(19) United States
(12) Patent Application Publication
(10) Pub. No.: US 2026/0151508 A1
(43) Pub. Date: Jun. 4, 2026

(54) METHODS AND COMPOSITIONS FOR TREATING ALPHA-1 ANTITRYPSIN DEFICIENCY

(71) Applicant: Beam Therapeutics Inc., Cambridge, MA (US)

(72) Inventors: Michael Packer, Cambridge, MA (US); Brian Cafferty, Cambridge, MA (US); Yi Yu, Cambridge, MA (US)

(73) Assignee: Beam Therapeutics Inc., Cambridge, MA (US)

(21) Appl. No.: 19/416,825

(22) Filed: Dec. 11, 2025

Related U.S. Application Data
(63) Continuation of application No. PCT/US2024/034189, filed on Jun. 14, 2024.
(60) Provisional application No. 63/508,469, filed on Jun. 15, 2023.
(60) Provisional application No. 63/580,925, filed on Sep. 6, 2023.

(51) Int. Cl. A61K 48/00; A61K 38/57; A61P 1/16; C12N 5/071; C12N 9/22; C12N 9/78; C12N 15/11

(52) U.S. Cl. CPC A61K 48/005; A61K 38/57; A61P 1/16; C12N 5/067; C12N 9/226; C12N 9/78; C12N 15/111; C07K 2319/80; C12N 2310/20; C12N 2510/00; C12Y 305/04004

(57) ABSTRACT

Compositions and methods for editing deleterious mutations associated with Alpha-1 Antitrypsin Deficiency (A1AD). In particular embodiments, the invention provides methods for treating A1AD using a modified adenosine base editor with improved on-target editing and decreased off-target editing to correct mutations associated with A1AD.

### CROSS REFERENCE TO RELATED APPLICATIONS

[0001] This application is a continuation under 35 U.S.C. § 111(a) of PCT International Patent Application No. PCT/US2024/034189, filed Jun. 14, 2024, designating the United States and published in English, which claims priority to and the benefit of U.S. Provisional Application No. 63/580,925, filed Sep. 6, 2023, and U.S. Provisional Application No. 63/508,469, filed Jun. 15, 2023, the entire contents of each of which are incorporated by reference herein.

### SEQUENCE LISTING

[0002] This application contains a Sequence Listing which has been submitted electronically in XML format and is hereby incorporated by reference in its entirety. The Sequence Listing XML file, created on Feb. 5, 2026, is named 180802-049704US_SL.xml, and is 1,109,624 bytes in size.

### INCORPORATION BY REFERENCE

[0003] All publications, patents, and patent applications mentioned in this specification are herein incorporated by reference to the same extent as if each individual publication, patent, or patent application was specifically and individually indicated to be incorporated by reference. Absent any indication otherwise, publications, patents, and patent applications mentioned in this specification are incorporated herein by reference in their entireties.

### BACKGROUND

[0004] In healthy individuals, alpha-1 antitrypsin (A1AT) is produced by hepatocytes within the liver and secreted into systemic circulation where it functions as a protease inhibitor. It is a particularly good inhibitor of neutrophil elastase, thus protecting tissues and organs such as the lung from elastin degradation. In patients with Alpha-1 Antitrypsin Deficiency (A1AD), mutations in the gene that encodes A1AT lead to diminished protein production. Consequently, elastin in the lung is degraded more readily by neutrophil elastase, and over time the loss in lung elasticity develops into chronic obstructive pulmonary disease (COPD).

[0005] The most common pathogenic A1AT variant is a Guanine to Adenine mutation resulting in a glutamate to lysine substitution at amino acid 342 of the A1AT polypeptide. This substitution causes the protein to misfold and polymerize within hepatocytes, and ultimately the toxic aggregates can lead to liver injury and cirrhosis. While the liver toxicity could be addressed by a gene knockout (e.g., using CRISPR/ZFN/TALEN) or gene knockdown (e.g., using siRNA), neither approach addresses the pulmonary pathology. Although pulmonary pathology may be addressed with protein replacement therapy, this therapy also fails to address the liver toxicity. Gene therapy also would be inadequate to address the A1AT genetic defect. Because the liver of patients with A1AD is already under a severe disease burden caused by the endogenous A1AT, gene therapy that increases A1AT in the liver would be counterproductive.

[0006] Base editing technologies represent an approach that could be used to treat patients with A1AD that addresses both the lung pathology and the liver toxicity. In particular, base editing methods and compositions that are capable of correcting point mutations associated with A1AT with improved on-target and/or decreased off-target editing are needed.

### SUMMARY

[0007] As described below, the present invention features compositions and methods for editing deleterious mutations associated with Alpha-1 Antitrypsin Deficiency (A1AD). In particular embodiments, the invention provides methods for treating A1AD using a modified adenosine base editor with improved on-target editing and decreased off-target editing to correct mutations associated with A1AD.

[0008] In one aspect, the disclosure features base editor containing a nucleic acid programmable DNA binding protein (napDNAbp) domain and an adenosine deaminase domain. The polynucleotide programmable DNA binding domain variant contains an alteration selected from one or more of M1135L, E1250K, A1283D, Q1136Y, R1337K, R765A, and Q768A of an amino acid sequence, that is at least 80%, 85%, 90%, 95%, 96%, 97%, 98%, 99% or 100% identical to the following sequence, or a fragment thereof lacking an N-terminal methionine:

(SEQ ID NO: 554)
MDKKYSIGLAIGTNSVGWAVITDEYKVPSKKFKVLGNTDRHSIKKNLIGALLFDSGETAEAT
RLKRTARRRYTRRKNRICYLQEIFSNEMAKVDDSFFHRLEESFLVEEDKKHERHPIFGNIVD
EVAYHEKYPTIYHLRKKLVDSTDKADLRLIYLALAHMIKFRGHFLIEGDLNPDNSDVDKLFI
QLVQTYNQLFEENPINASGVDAKAILSARLSKSRRLENLIAQLPGEKKNGLFGNLIALSLGL
TPNFKSNFDLAEDAKLQLSKDTYDDDLDNLLAQIGDQYADLFLAAKNLSDAILLSDILRVNT
EITKAPLSASMVKRYDEHHQDLTLLKALVRQQLPEKYKEIFFDQSKNGYAGYIDGGASQEEF
YKFIKPILEKMDGTEELLVKLNREDLLRKQRTFDNGIIPHQIHLGELHAILRRQGDFYPFLK
DNREKIEKILTFRIPYYVGPLARGNSRFAWMTRKSEETITPWNFEEVVDKGASAQSFIERMT
NFDKNLPNEKVLPKHSLLYEYFTVYNELTKVKYVTEGMRKPAFLSGEQKKAIVDLLFKTNRK
VTVKQLKEDYFKKIECFDSVEISGVEDRFNASLGTYHDLLKIIKDKDFLDNEENEDILEDIV
LTLTLFEDREMIEERLKTYAHLFDDKVMKQLKRLRYTGWGRLSRKLINGIRDKQSGKTILDF
LKSDGFANRNFMQLIHDDSLTFKEDIQKAQVSGQGDSLHEHIANLAGSPAIKKGILQTVKVV
DELVKVMGGHKPENIVIEMARENQTTQKGQKNSRERMKRIEEGIKELGSQILKEHPVENTQL
QNEKLYLYYLQNGRDMYVDQELDINRLSDYDVDHIVPQSFLKDDSIDNKVLTRSDKNRGKSD
NVPSEEVVKKMKNYWRQLLNAKLITQRKFDNLTKAERGGLSELDKAGFIKRQLVETRQITKH
VAQILDSRMNTKYDENDKLIREVKVITLKSKLVSDFRKDFQFYKVREINNYHHAHDAYLNAV
VGTALIKKYPKLESEFVYGDYKVYDVRKMIAKSEQEIGKATAKYFFYSNIMNFFKTEITLAN
GEIRKRPLIETNGETGEIVWDKGRDFATVRKVLSMPQVNIVKKTEVQTGGFSKESILPKGNS
DKLIARKKDWDPKKYGGFMQPTVAYSVLVVAKVEKGKSKKLKSVKELLGITIMERSSFEKNP
IDFLEAKGYKEVKKDLIIKLPKYSLFELENGRKRMLASAKFLQKGNELALPSKYVNFLYLAS
HYEKLKGSPEDNEQKQLFVEQHKHYLDEIIEQISEFSKRVILADANLDKVLSAYNKHRDKPI
REQAENIIHLFTLTNLGAPRAFKYFDTTIARKEYRSTKEVLDATLIHQSITGLYETRIDLSQ
LGGD.

[0009] In another aspect, the disclosure features a base editor system containing the base editor of any aspect of the disclosure, or embodiments thereof, or one or more polynucleotides encoding the base editor, and a guide polynucleotide, or a polynucleotide encoding the guide polynucleotide.

[0010] In another aspect, the disclosure features a guide polynucleotide, or a polynucleotide encoding the guide polynucleotide. The guide polynucleotide contains a nucleotide sequence selected from one or more of: 5′-ACCAUCGACAAGAAAGGGACUGA-3′ (SEQ ID NO: 466); 5′-CCAUCGACAAGAAAGGGACUGA-3′ (SEQ ID NO: 559); 5′-CAUCGACAAGAAAGGGACUGA-3′ (SEQ ID NO: 560); 5′-AUCGACAAGAAAGGGACUGA-3′ (SEQ ID NO: 561); 5′-UCGACAAGAAAGGGACUGA-3′ (SEQ ID NO: 562); and 5′-CGACAAGAAAGGGACUGA-3′ (SEQ ID NO: 563).

[0011] In another aspect, the disclosure features a method of editing an alpha-1 antitrypsin polynucleotide containing a single nucleotide polymorphism (SNP) associated with alpha-1 antitrypsin deficiency. The method involves contacting the polynucleotide with one or more guide RNAs, or one or more polynucleotides encoding the one or more guide RNAs, and a base editor, or one or more polynucleotides encoding the base editor. The guide RNA targets the base editor to effect an alteration of the SNP associated with alpha-1 antitrypsin deficiency. The base editor is the base editor of any one of any aspect of the disclosure, or embodiments thereof. The one or more guide RNAs contain the guide polynucleotide of any aspect of the disclosure, or embodiments thereof.

[0012] In another aspect, the disclosure features a method of editing an alpha-1 antitrypsin polynucleotide containing a single nucleotide polymorphism (SNP) associated with alpha-1 antitrypsin deficiency. The method involves contacting an alpha-1 antitrypsin polynucleotide with one or more guide RNAs and a fusion protein containing the following amino acid sequence:

(SEQ ID NO: 588)
SEVEFSHEYWMRHALTLAKRARDEREVPVGAVLVHNNRVIGEGWNRAIGLHDPTAHAEIMAL
RQGGLVMQNYRLYDATLYTTFEPCVMCAGAMIHSRIGRVVFGVRNAKTGAAGSLMDVLHYPG
MNHRVEITEGILADECAALLCTFFRMPRSVFKAQKKAQSSTDSGGSSGGSSGSETPGTSESA
TPESSGGSSGGSDKKYSIGLAIGTNSVGWAVITDEYKVPSKKFKVLGNTDRHSIKKNLIGAL
LFDSGETAEATRLKRTARRRYTRRKNRICYLQEIFSNEMAKVDDSFFHRLEESFLVEEDKKH
ERHPIFGNIVDEVAYHEKYPTIYHLRKKLVDSTDKADLRLIYLALAHMIKFRGHFLIEGDLN
PDNSDVDKLFIQLVQTYNQLFEENPINASGVDAKAILSARLSKSRRLENLIAQLPGEKKNGL
FGNLIALSLGLTPNFKSNFDLAEDAKLQLSKDTYDDDLDNLLAQIGDQYADLFLAAKNLSDA
ILLSDILRVNTEITKAPLSASMVKRYDEHHQDLTLLKALVRQQLPEKYKEIFFDQSKNGYAG
YIDGGASQEEFYKFIKPILEKMDGTEELLVKLNREDLLRKQRTFDNGIIPHQIHLGELHAIL
RRQGDFYPFLKDNREKIEKILTFRIPYYVGPLARGNSRFAWMTRKSEETITPWNFEEVVDKG
ASAQSFIERMTNFDKNLPNEKVLPKHSLLYEYFTVYNELTKVKYVTEGMRKPAFLSGEQKKA
IVDLLFKTNRKVTVKQLKEDYFKKIECFDSVEISGVEDRFNASLGTYHDLLKIIKDKDFLDN
EENEDILEDIVLTLTLFEDREMIEERLKTYAHLFDDKVMKQLKRLRYTGWGRLSRKLINGIR
DKQSGKTILDFLKSDGFANRNFMQLIHDDSLTFKEDIQKAQVSGQGDSLHEHIANLAGSPAI
KKGILQTVKVVDELVKVMGGHKPENIVIEMARENQTTQKGQKNSRERMKRIEEGIKELGSQI
LKEHPVENTQLQNEKLYLYYLQNGRDMYVDQELDINRLSDYDVDHIVPQSFLKDDSIDNKVL
TRSDKNRGKSDNVPSEEVVKKMKNYWRQLLNAKLITQRKFDNLTKAERGGLSELDKAGFIKR
QLVETRQITKHVAQILDSRMNTKYDENDKLIREVKVITLKSKLVSDFRKDFQFYKVREINNY
HHAHDAYLNAVVGTALIKKYPKLESEFVYGDYKVYDVRKMIAKSEQEIGKATAKYFFYSNIM
NFFKTEITLANGEIRKRPLIETNGETGEIVWDKGRDFATVRKVLSMPQVNIVKKTEVQTGGF
SKESILPKGNSDKLIARKKDWDPKKYGGFLQPTVAYSVLVVAKVEKGKSKKLKSVKELLGIT
IMERSSFEKNPIDFLEAKGYKEVKKDLIIKLPKYSLFELENGRKRMLASAKFLQKGNELALP
SKYVNFLYLASHYEKLKGSPKDNEQKQLFVEQHKHYLDEIIEQISEFSKRVILDDANLDKVL
SAYNKHRDKPIREQAENIIHLFTLTNLGAPRAFKYFDTTIARKEYKSTKEVLDATLIHQSIT
GLYETRIDLSQLGGDEGADKRTADGSEFESPKKKRKV.

[0013] In another aspect, the disclosure features a polynucleotide or set of polynucleotides encoding the base editor of any aspect of the disclosure, or embodiments thereof.

[0014] In another aspect, the disclosure features a vector or set of vectors containing the polynucleotide or set of polynucleotides of any aspect of the disclosure, or embodiments thereof.

[0015] In another aspect, the disclosure features a cell produced by introducing into the cell, or a progenitor thereof the base editor of any aspect of the disclosure, or embodiments thereof, or one or more polynucleotides encoding the base editor, and one or more guide polynucleotides, or one or more polynucleotides encoding the one or more guide polynucleotides. The one or more guide polynucleotides target the base editor to effect an A•T to G•C alteration of an SNP associated with alpha-1 antitrypsin deficiency.

[0016] In another aspect, the disclosure features a method of treating alpha-1 antitrypsin deficiency in a subject. The method involves administering to the subject a cell of any aspect of the disclosure, or embodiments thereof.

[0017] In another aspect, the disclosure features a method of producing a hepatocyte cell. The method involves (a) introducing into a hepatocyte progenitor containing an SNP associated with alpha-1 antitrypsin deficiency the base editor of any aspect of the disclosure, or embodiments thereof, or one or more polynucleotides encoding the base editor, and one or more guide polynucleotides, or one or more polynucleotides encoding the one or more guide polynucleotides. The one or more guide polynucleotides target the base editor to effect an A•T to G•C alteration of the SNP associated with alpha-1 antitrypsin deficiency. The method further involves (b) differentiating the hepatocyte progenitor into a hepatocyte.

[0018] In another aspect, the disclosure features an isolated cell or population of cells propagated or expanded from the cell of any aspect of the disclosure, or embodiments thereof.

[0019] In another aspect, the disclosure features a method of producing a hepatocyte cell. The method involves (a) introducing into a hepatocyte containing an SNP associated with alpha-1 antitrypsin deficiency the base editor of any aspect of the disclosure, or embodiments thereof, or one or more polynucleotides encoding the base editor; and one or more guide polynucleotides, or one or more polynucleotides encoding the one or more guide polynucleotides. The one or more guide polynucleotides target the base editor to effect an A•T to G•C alteration of the SNP associated with alpha-1 antitrypsin deficiency.

[0020] In another aspect, the disclosure features a method for treating alpha-1 antitrypsin deficiency (A1AD) in a subject. The method involves administering to the subject the base editor of any aspect of the disclosure, or embodiments thereof, or one or more polynucleotides encoding the base editor, and one or more guide polynucleotides that target the base editor to effect an A•T to G•C alteration of a single nucleotide polymorphism (SNP) associated with A1AD, thereby treating A1AD in the subject.

[0021] In another aspect, the disclosure features a pharmaceutical composition containing the base editor system of any aspect of the disclosure, or embodiments thereof, and a pharmaceutically acceptable carrier, vehicle, or excipient.

[0022] In another aspect, the disclosure features a pharmaceutical composition containing the cell of any aspect of the disclosure, or embodiments thereof, and a pharmaceutically acceptable carrier, vehicle, or excipient.

[0023] In another aspect, the disclosure features a kit containing a base editing system of any aspect of the disclsoure, or embodiments thereof.

[0024] In another aspect, the disclosure features a kit containing the cell of any aspect of the disclosure, or embodiments thereof.

[0025] In another aspect, the disclosure features a TadA variant containing an amino acid sequence that is at least 80%, 85%, 90%, 95%, 96%, 97%, 98%, 99%, or 100% identical to a TadA*5 or the following amino acid sequence, or a fragment thereof that does not contain an N-terminal methionine:

### Variant 12

[0026] MSEVEFSHEYWMRHALTLAKRARDEREVPVGAVLVHNNRVIGEGWNRAIGLHDPTAHAEIMA LRQGGLVMQNYRLYDATLYTTFEPCVMCAGAMIHSRIGRVVFGVRNAKTGAAGSLMDVLHYP GMNHRVEITEGILADECAALLCTFFRMPRSVFKAQKKAQSSTD (SEQ ID NO: 589). The TadA variant further contains any of the amino acid substitutions or combinations of substitutions listed in any one of Tables 12, 14, or, 17.

[0027] In another aspect, the disclosure features a Cas9 variant containing an amino acid sequence that is at least 80%, 85%, 90%, 95%, 96%, 97%, 98%, 99%, or 100% identical to SpCas9 or the following amino acid sequence, or a fragment thereof that does not contain an N-terminal methionine:

(SEQ ID NO: 590)
MDKKYSIGLAIGTNSVGWAVITDEYKVPSKKFKVLGNTDRHSIKKNLIGALLFDSGETAEAT
RLKRTARRRYTRRKNRICYLQEIFSNEMAKVDDSFFHRLEESFLVEEDKKHERHPIFGNIVD
EVAYHEKYPTIYHLRKKLVDSTDKADLRLIYLALAHMIKFRGHFLIEGDLNPDNSDVDKLFI
QLVQTYNQLFEENPINASGVDAKAILSARLSKSRRLENLIAQLPGEKKNGLFGNLIALSLGL
TPNFKSNFDLAEDAKLQLSKDTYDDDLDNLLAQIGDQYADLFLAAKNLSDAILLSDILRVNT
EITKAPLSASMVKRYDEHHQDLTLLKALVRQQLPEKYKEIFFDQSKNGYAGYIDGGASQEEF
YKFIKPILEKMDGTEELLVKLNREDLLRKQRTFDNGIIPHQIHLGELHAILRRQGDFYPFLK
DNREKIEKILTFRIPYYVGPLARGNSRFAWMTRKSEETITPWNFEEVVDKGASAQSFIERMT
NFDKNLPNEKVLPKHSLLYEYFTVYNELTKVKYVTEGMRKPAFLSGEQKKAIVDLLFKTNRK
VTVKQLKEDYFKKIECFDSVEISGVEDRFNASLGTYHDLLKIIKDKDFLDNEENEDILEDIV
LTLTLFEDREMIEERLKTYAHLFDDKVMKQLKRLRYTGWGRLSRKLINGIRDKQSGKTILDF
LKSDGFANRNFMQLIHDDSLTFKEDIQKAQVSGQGDSLHEHIANLAGSPAIKKGILQTVKVV
DELVKVMGGHKPENIVIEMARENQTTQKGQKNSRERMKRIEEGIKELGSQILKEHPVENTQL
QNEKLYLYYLQNGRDMYVDQELDINRLSDYDVDHIVPQSFLKDDSIDNKVLTRSDKNRGKSD
NVPSEEVVKKMKNYWRQLLNAKLITQRKFDNLTKAERGGLSELDKAGFIKRQLVETRQITKH
VAQILDSRMNTKYDENDKLIREVKVITLKSKLVSDFRKDFQFYKVREINNYHHAHDAYLNAV
VGTALIKKYPKLESEFVYGDYKVYDVRKMIAKSEQEIGKATAKYFFYSNIMNFFKTEITLAN
GEIRKRPLIETNGETGEIVWDKGRDFATVRKVLSMPQVNIVKKTEVQTGGFSKESILPKGNS
DKLIARKKDWDPKKYGGFMQPTVAYSVLVVAKVEKGKSKKLKSVKELLGITIMERSSFEKNP
IDFLEAKGYKEVKKDLIIKLPKYSLFELENGRKRMLASAKFLQKGNELALPSKYVNFLYLAS
HYEKLKGSPEDNEQKQLFVEQHKHYLDEIIEQISEFSKRVILADANLDKVLSAYNKHRDKPI
REQAENIIHLFTLTNLGAPRAFKYFDTTIARKEYRSTKEVLDATLIHQSITGLYETRIDLSQ
LGGD,

further containing any of the amino acid substitutions or combinations of substitutions listed in any one of Tables 7, 8, 13, 15, 16, 17, or 18.

[0028] In any aspect of the disclosure, or embodiments thereof, the napDNAbp contains one, two, three, four, five or six amino acid alterations selected from one or more of M1135L, E1250K, A1283D, Q1136Y, R1337K, R765A, and Q768A. In any aspect of the disclosure, or embodiments thereof, the napDNAbp contains a combination of amino acid alterations selected from one or more of: R1337K; Q1136Y, and R1337K; M1135L, Q1136Y, and R1337K; Q1136Y, and R1337K; M1135L, Q1136Y, and R1337K; M1135L, A1283D, Q1136Y, and R1337K; M1135L, A1283D, E1250K, and R1337K; A1283D, E1250K, and Q1136Y; M1135L, A1283D, Q1136Y, and R1337K; M1135L, A1283D, Q1136Y, R1337K, R765A, and Q768A; and A1283D, E1250K, and Q1136Y. In any aspect of the disclosure, or embodiments thereof, the napDNAbp contains the alterations M1135L, A1283D, E1250K, and R1337K. In any aspect of the disclosure, or embodiments thereof, the napDNAbp contains of the following amino acid sequence:

Variant G
(SEQ ID NO: 555)
DKKYSIGLAIGTNSVGWAVITDEYKVPSKKFKVLGNTDRHSIKKNLIGALLFDSGETAEATR
LKRTARRRYTRRKNRICYLQEIFSNEMAKVDDSFFHRLEESFLVEEDKKHERHPIFGNIVDE
VAYHEKYPTIYHLRKKLVDSTDKADLRLIYLALAHMIKFRGHFLIEGDLNPDNSDVDKLFIQ
LVQTYNQLFEENPINASGVDAKAILSARLSKSRRLENLIAQLPGEKKNGLFGNLIALSLGLT
PNFKSNFDLAEDAKLQLSKDTYDDDLDNLLAQIGDQYADLFLAAKNLSDAILLSDILRVNTE
ITKAPLSASMVKRYDEHHQDLTLLKALVRQQLPEKYKEIFFDQSKNGYAGYIDGGASQEEFY
KFIKPILEKMDGTEELLVKLNREDLLRKQRTFDNGIIPHQIHLGELHAILRRQGDFYPFLKD
NREKIEKILTFRIPYYVGPLARGNSRFAWMTRKSEETITPWNFEEVVDKGASAQSFIERMTN
FDKNLPNEKVLPKHSLLYEYFTVYNELTKVKYVTEGMRKPAFLSGEQKKAIVDLLFKTNRKV
TVKQLKEDYFKKIECFDSVEISGVEDRFNASLGTYHDLLKIIKDKDFLDNEENEDILEDIVL
TLTLFEDREMIEERLKTYAHLFDDKVMKQLKRLRYTGWGRLSRKLINGIRDKQSGKTILDFL
KSDGFANRNFMQLIHDDSLTFKEDIQKAQVSGQGDSLHEHIANLAGSPAIKKGILQTVKVVD
ELVKVMGGHKPENIVIEMARENQTTQKGQKNSRERMKRIEEGIKELGSQILKEHPVENTQLQ
NEKLYLYYLQNGRDMYVDQELDINRLSDYDVDHIVPQSFLKDDSIDNKVLTRSDKNRGKSDN
VPSEEVVKKMKNYWRQLLNAKLITQRKFDNLTKAERGGLSELDKAGFIKRQLVETRQITKHV
AQILDSRMNTKYDENDKLIREVKVITLKSKLVSDFRKDFQFYKVREINNYHHAHDAYLNAVV
GTALIKKYPKLESEFVYGDYKVYDVRKMIAKSEQEIGKATAKYFFYSNIMNFFKTEITLANG
EIRKRPLIETNGETGEIVWDKGRDFATVRKVLSMPQVNIVKKTEVQTGGFSKESILPKGNSD
KLIARKKDWDPKKYGGFLQPTVAYSVLVVAKVEKGKSKKLKSVKELLGITIMERSSFEKNPI
DFLEAKGYKEVKKDLIIKLPKYSLFELENGRKRMLASAKFLQKGNELALPSKYVNFLYLASH
YEKLKGSPKDNEQKQLFVEQHKHYLDEIIEQISEFSKRVILDDANLDKVLSAYNKHRDKPIR
EQAENIIHLFTLTNLGAPRAFKYFDTTIARKEYKSTKEVLDATLIHQSITGLYETRIDLSQL
GGD.

[0029] In any aspect of the disclosure, or embodiments thereof, the adenosine deaminase domain contains an amino acid sequence that is at least 80%, 85%, 90%, 95%, 96%, 97%, 98%, 99%, or 100% identical to the following amino acid sequence: SEVEFSHEYWMRHALTLAKRARDEREVPVGAVLVHNNRVIGEGWNRAIGLHDPTAHAEIMAL RQGGLVMQNYRLYDATLYTTFEPCVMCAGAMIHSRIGRVVFGVRNAKTGAAGSLMDVLHYPG MNHRVEITEGILADECAALLCTFFRMPRSVFKAQKKAQSSTD (SEQ ID NO: 426). In any aspect of the disclosure, or embodiments thereof, the adenosine deaminase domain is a TadA*7.10 variant that contains or only contains the following amino acid sequence, or a fragment thereof having adenosine deaminase activity: SEVEFSHEYWMRHALTLAKRARDEREVPVGAVLVHNNRVIGEGWNRAIGLHDPTAHAEIMAL RQGGLVMQNYRLYDATLYTTFEPCVMCAGAMIHSRIGRVVFGVRNAKTGAAGSLMDVLHYPG MNHRVEITEGILADECAALLCTFFRMPRSVFKAQKKAQSSTD (SEQ ID NO: 426). In any aspect of the disclosure, or embodiments thereof, the adenosine deaminase is a truncated TadA*7.10 variant that is missing 1, 2, 3, 4, 5, 6, 7, 8, 9, 10, 11, 12, 13, 14, 15, 6, 17, 18, 19, or 20 N-terminal amino acid residues relative to the following amino acid sequence: SEVEFSHEYWMRHALTLAKRARDEREVPVGAVLVHNNRVIGEGWNRAIGLHDPTAHAEIMAL RQGGLVMQNYRLYDATLYTTFEPCVMCAGAMIHSRIGRVVFGVRNAKTGAAGSLMDVLHYPG MNHRVEITEGILADECAALLCTFFRMPRSVFKAQKKAQSSTD (SEQ ID NO: 426). In any aspect of the disclosure, or embodiments thereof, the adenosine deaminase is a truncated TadA*7.10 variant that is missing 1, 2, 3, 4, 5, 6, 7, 8, 9, 10, 11, 12, 13, 14, 15, 6, 17, 18, 19, or 20 C-terminal amino acid residues relative to the following amino acid sequence:

(SEQ ID NO: 426)
SEVEFSHEYWMRHALTLAKRARDEREVPVGAVLVHNNRVIGEGWNRAIGL
HDPTAHAEIMALRQGGLVMQNYRLYDATLYTTFEPCVMCAGAMIHSRIGR
VVFGVRNAKTGAAGSLMDVLHYPGMNHRVEITEGILADECAALLCTFFRM
PRSVFKAQKKAQSSTD.

[0030] In any aspect of the disclosure, or embodiments thereof, the base editor further contains a linker between the adenosine deaminase and the napDNAbp. In embodiments, the linker contains one or more amino acids. In embodiments, the linker contains an amino acid sequence selected from those listed in Tables 9, 10, or 11. In embodiments, the linker contains an amino acid sequence selected from one or more of: SGGSSGGSSGSETPGTSESATPESSGGSSGGS (SEQ ID NO: 357), EGGSEEEEESGS (SEQ ID NO: 542), and KGPKPKKEESEK (SEQ ID NO: 439). In embodiments, the linker contains the following amino acid sequence: SGGSSGGSSGSETPGTSESATPESSGGSSGGS (SEQ ID NO: 357).

[0031] In any aspect of the disclosure, or embodiments thereof, the base editor further contains a nuclear localization sequence (NLS). In embodiments, the NLS contains the amino acid sequence EGADKRTADGSEFESPKKKRKV (SEQ ID NO: 438).

[0032] In any aspect of the disclosure, or embodiments thereof, the base editor contains an amino acid sequence that is at least 80%, 85%, 90%, 95%, 96%, 97%, 98%, 99%, or 100% identical to the following amino acid sequence:

Variant G
(SEQ ID NO: 557)
SEVEFSHEYWMRHALTLAKRARDEREVPVGAVLVHNNRVIGEGWNRAIGLHDPTAHAEIMAL
RQGGLVMQNYRLYDATLYTTFEPCVMCAGAMIHSRIGRVVFGVRNAKTGAAGSLMDVLHYPG
MNHRVEITEGILADECAALLCTFFRMPRSVFKAQKKAQSSTDSGGSSGGSSGSETPGTSESA
TPESSGGSSGGSDKKYSIGLAIGTNSVGWAVITDEYKVPSKKFKVLGNTDRHSIKKNLIGAL
LFDSGETAEATRLKRTARRRYTRRKNRICYLQEIFSNEMAKVDDSFFHRLEESFLVEEDKKH
ERHPIFGNIVDEVAYHEKYPTIYHLRKKLVDSTDKADLRLIYLALAHMIKFRGHFLIEGDLN
PDNSDVDKLFIQLVQTYNQLFEENPINASGVDAKAILSARLSKSRRLENLIAQLPGEKKNGL
FGNLIALSLGLTPNFKSNFDLAEDAKLQLSKDTYDDDLDNLLAQIGDQYADLFLAAKNLSDA
ILLSDILRVNTEITKAPLSASMVKRYDEHHQDLTLLKALVRQQLPEKYKEIFFDQSKNGYAG
YIDGGASQEEFYKFIKPILEKMDGTEELLVKLNREDLLRKQRTFDNGIIPHQIHLGELHAIL
RRQGDFYPFLKDNREKIEKILTFRIPYYVGPLARGNSRFAWMTRKSEETITPWNFEEVVDKG
ASAQSFIERMTNFDKNLPNEKVLPKHSLLYEYFTVYNELTKVKYVTEGMRKPAFLSGEQKKA
IVDLLFKTNRKVTVKQLKEDYFKKIECFDSVEISGVEDRFNASLGTYHDLLKIIKDKDFLDN
EENEDILEDIVLTLTLFEDREMIEERLKTYAHLFDDKVMKQLKRLRYTGWGRLSRKLINGIR
DKQSGKTILDFLKSDGFANRNFMQLIHDDSLTFKEDIQKAQVSGQGDSLHEHIANLAGSPAI
KKGILQTVKVVDELVKVMGGHKPENIVIEMARENQTTQKGQKNSRERMKRIEEGIKELGSQI
LKEHPVENTQLQNEKLYLYYLQNGRDMYVDQELDINRLSDYDVDHIVPQSFLKDDSIDNKVL
TRSDKNRGKSDNVPSEEVVKKMKNYWRQLLNAKLITQRKFDNLTKAERGGLSELDKAGFIKR
QLVETRQITKHVAQILDSRMNTKYDENDKLIREVKVITLKSKLVSDFRKDFQFYKVREINNY
HHAHDAYLNAVVGTALIKKYPKLESEFVYGDYKVYDVRKMIAKSEQEIGKATAKYFFYSNIM
NFFKTEITLANGEIRKRPLIETNGETGEIVWDKGRDFATVRKVLSMPQVNIVKKTEVQTGGF
SKESILPKGNSDKLIARKKDWDPKKYGGFLQPTVAYSVLVVAKVEKGKSKKLKSVKELLGIT
IMERSSFEKNPIDFLEAKGYKEVKKDLIIKLPKYSLFELENGRKRMLASAKFLQKGNELALP
SKYVNFLYLASHYEKLKGSPKDNEQKQLFVEQHKHYLDEIIEQISEFSKRVILDDANLDKVL
SAYNKHRDKPIREQAENIIHLFTLTNLGAPRAFKYFDTTIARKEYKSTKEVLDATLIHQSIT
GLYETRIDLSQLGGDEGADKRTADGSEFESPKKKRKV.

[0033] In any aspect of the disclosure, or embodiments thereof, the guide polynucleotide is a single guide RNA (sgRNA). In any aspect of the disclosure, or embodiments thereof, the guide polynucleotide contains a spacer containing a nucleotide sequence selected from one or more of: 5′-ACCAUCGACAAGAAAGGGACUGA-3′ (SEQ ID NO: 466); 5′-CCAUCGACAAGAAAGGGACUGA-3′ (SEQ ID NO: 559); 5′-CAUCGACAAGAAAGGGACUGA-3′ (SEQ ID NO: 560); 5′-AUCGACAAGAAAGGGACUGA-3′ (SEQ ID NO: 561); 5′-UCGACAAGAAAGGGACUGA-3′ (SEQ ID NO: 562); and 5′-CGACAAGAAAGGGACUGA-3′ (SEQ ID NO: 563). In any aspect of the disclosure, or embodiments thereof, the guide polynucleotide contains a scaffold containing a nucleotide sequence that is at least 90%, 95%, 96%, 97%, 98%, 99%, or 100% identical to the following nucleotide sequence: 5′-GT-UAGAGC UAGAAAUAGC AAGUUAAAAU AAGGCUAGUC CGUUAUCAAC UUGAAAAAGU GGCACCGAGU CGGUGCUUUU-3′ (SEQ ID NO: 324). In any aspect of the disclosure, or embodiments thereof, the guide polynucleotide contains a nucleotide sequence selected from one or more of: 5′-ACCAUCGACAAGAAAGGGACUGA GUUUUAGAGC UAGAAAUAGC AAGUUAAAAU AAGGCUAGUC CGUUAUCAAC UUGAAAAAGU GGCACCGAGU CGGUGCUUUU-3′ (SEQ ID NO: 558); 5′-CCAUCGACAAGAAAGGGACUGA GUUUUAGAGC UAGAAAUAGC AAGUUAAAAU AAGGCUAGUC CGUUAUCAAC UUGAAAAAGU GGCACCGAGU CGGUGCUUUU-3′ (SEQ ID NO: 564); 5′-CAUCGACAAGAAAGGGACUGA GUUUUAGAGC UAGAAAUAGC AAGUUAAAAU AAGGCUAGUC CGUUAUCAAC UUGAAAAAGU GGCACCGAGU CGGUGCUUUU-3′ (SEQ ID NO: 565); 5′-AUCGACAAGAAAGGGACUGA GUUUUAGAGC UAGAAAUAGC AAGUUAAAAU AAGGCUAGUC CGUUAUCAAC UUGAAAAAGU GGCACCGAGU CGGUGCUUUU-3′ (SEQ ID NO: 566); 5′-UCGACAAGAAAGGGACUGA GUUUUAGAGC UAGAAAUAGC AAGUUAAAAU AAGGCUAGUC CGUUAUCAAC UUGAAAAAGU GGCACCGAGU CGGUGCUUUU-3′ (SEQ ID NO: 567); and 5′-CGACAAGAAAGGGACUGA GUUUUAGAGC UAGAAAUAGC AAGUUAAAAU AAGGCUAGUC CGUUAUCAAC UUGAAAAAGU GGCACCGAGU CGGUGCUUUU-3′(SEQ ID NO: 568). In any aspect of the disclosure, or embodiments thereof, the guide polynucleotide contains the following nucleotide sequence:

(SEQ ID NO: 566)
5'-AUCGACAAGAAAGGGACUGA GUUUUAGAGC UAGAAAUAGC
AAGUUAAAAU AAGGCUAGUC CGUUAUCAAC UUGAAAAAGU
GGCACCGAGU CGGUGCUUUU-3'.

[0034] In any aspect of the disclosure, or embodiments thereof, the guide polynucleotide contains one or more modified nucleotides. In any aspect of the disclosure, or embodiments thereof, the guide polynucleotide contains a nucleotide having a 2′-OMe modification, a 2′-fluoro (F) modification, and/or a phosphorothioate modification. In any aspect of the disclosure, or embodiments thereof, the guide polynucleotide contains a nucleotide sequence, from 5′ to 3′, selected from one or more of: mAsmUsmCsGACAAGAAAGGGACUGAGUUUUAGAGCUAGAAAUAGCAAGUUAAAAUAAGGCU AGUCCGUUAUCAACUUGAAAAAGUGGCACCGAGUCGGUGCmUsmUsmUsU (SEQ ID NO: 569); mAsmUsmCsGACAAGAAAGGGACUGAGUUUUAGAGCUAGAAAUAGCAAGUUAAAAUAAGGCU AGUCCGUUAUCAACUUGAAAAAGUGGCACCGAGUCGGUGCUsmUsmUsmU (SEQ ID NO: 570), where the guide is covalently linked at the 3′ end to a peptide with the amino acid sequence CKRTADGSEFESPKKKRKV (SEQ ID NO: 543);

```
  (SEQ ID NO: 571)
mAsmUsmCsmGmAmCmAmAmGmAfAfAfGfGGsAsfCfUGsmAmGUsUsUsfUfAmGmAmGm
CmUmAmGmAmAmAmUmAmGmCmAmAmGUUmAAmAmAUmAmAmGmGCUmAGUCmCGUUmAmUm
CmAmAmCmUmUmGmAmAmAmAmAmGmUmGmGmCmAmCmCmGmAmGmUmCmGmGmUmGmCsmU
smUsmU;
  (SEQ ID NOs: 572)
mAsmUsmCsGACAAGAAAGGGACUGAmGUUUUAGmAmGmCmUmAmGmAmAmAmUmAmGmCmA
mAGUUmAAmAAmUAmAmGmGmCmUmAGUmCmCGUUAmUmCAAmCmUmUmGmAmAmAmAmAmG
mUmGGmCmAmCmCmGmAmGmUmCmGmGmUmGmCmUsmUsmUsmU;
  (SEQ ID NOS: 573)
mCsmAsmUsCGACAAGAAAGGGACUGAGUUUUAGAGCUAGAAAUAGCAAGUUAAAAUAAGGC
UAGUCCGUUAUCAACUUGAAAAAGUGGCACCGAGUCGGUGCmUsmUsmUsU;
(SEQ ID NOs: 574)
mAsmUsmCsmGmAmCmAmAmGmAfAfAfGIGGsAsfCUGmAmGUSUUfUfAmGmAmGmCmUm
AmGmAmAmAmUmAmGmCmAmAmGUUmAAmAmAUmAmAmGmGCUmAGUCmCGUUmAmUmCmAm
AmCmUmUmGmAmAmAmAmAmGUGmGmCmAmCmCmGmAmGmUmCmGmGmUmGmCsmUsmUsmU;
  (SEQ ID NOs: 575)
mAsmUsmCsGACAAGAAAGGGACUGAmGUUUUAGmAmGmCmUmAmGmAmAmAmUmAmGmCmA
mAGUUmAAmAAmUAmAmGmGmCmUmAGUmCmCGUUAmUmCAAmCmUmUmGmAmAmAmAmAmG
UGGmCmAmCmCmGmAmGmUmCmGmGmUmGmCmUsmUsmUsmU;
  (SEQ ID NOs: 576)
5'mAsmUsmCsmGmAmCmAmAmGmAAAGGGACUGmAmGUUUUAmGmAmGmCmUmAmGmAmAmA
mUmAmGmCmAmAmGUUmAAmAmAUmAmAmGmGCUmAGUCmCGUUmAmUmCmAmAmCmUmUmG
mAmAmAmAmAmGUGmGmCmAmCmCmGmAmGmUmCmGmGmUmGmCsmUsmUsmU;
  (SEQ ID NOs: 577)
mAsmUsmCsmGmAmCmAmAmGmAAAGGGACUGAmGUUUUAGmAmGmCmUmAmGmAmAmAmUm
AmGmCmAmAGUUmAAmAAmUAmAmGmGmCmUmAGUmCmCGUUAmUmCAAmCmUmUmGmAmAm
AmAmAmGUGGmCmAmCmCmGmAmGmUmCmGmGmUmGmCmUsmUsmUsmU;
  (SEQ ID NOS: 578)
mCsmAsmUsmCmGmAmCmAmAmGmAAAGGGACUGAmGUUUUAGmAmGmCmUmAmGmAmAmAm
UmAmGmCmAmAGUUmAAmAAmUAmAmGmGmCmUmAGUmCmCGUUAmUmCAAmCmUmUmGmAm
AmAmAmAmGUGGmCmAmCmCmGmAmGmUmCmGmGmUmGmCmUsmUsmUsmU;
  (SEQ ID NOs: 579)
mAsmUsmCsmGmAmCmAmAmGmAmAAmGmGGAmCUGmAmGUUUUAGmAmGmCmUmAmGmAmA
mAmUmAmGmCmAmAGUUmAAmAAmUAmAmGmGmCmUmAGUmCmCGUUAmUmCAAmCmUmUmG
mAmAmAmAmAmGUGGmCmAmCmCmGmAmGmUmCmGmGmUmGmCmUsmUsmUsmU;
  (SEQ ID NOs: 580);
mCsmAsmUsmCmGmAmCmAmAmGmAmAAmGmGGAmCUGmAmGUUUUAGmAmGmCmUmAmGmA
mAmAmUmAmGmCmAmAGUUmAAmAAmUAmAmGmGmCmUmAGUmCmCGUUAmUmCAAmCmUmU
mGmAmAmAmAmAmGUGGmCmAmCmCmGmAmGmUmCmGmGmUmGmCmUsmUsmUsmU
  (SEQ ID NOs: 581)
mCsmAsmUsCGACAAGAAAGGGACUGAmGUUUUAGmAmGmCmUmAmGmAmAmAmUmAmGmCm
AmAGUUmAAmAAmUAmAmGmGmCmUmAGUmCmCGUUAmUmCAAmCmUmUmGmAmAmAmAmAm
GUGGmCmAmCmCmGmAmGmUmCmGmGmUmGmCmUsmUsmUsmU;
and
  (SEQ ID NOs: 582)
mAsmUsmCsGACAAGAAAGGGACUGAGUUUUAGAmGmCmCmGmGmCmGmGmAmAmAmCmGmC
mCmGmGmCAAGUUAAAAUAAGGCUAGUCCGUUAUCAmAmCmUmUmGmAmAmAmAmAmGmUmG
mGmCmAmCmCmGmAmGmUmCmGmGmUmGmCmUsmUsmUsmU;
  (SEQ ID NOs: 583)
mAsmUsmCsmGmAmCmAmAmGmAAAGGGACUGAGUUUUAGAmGmCmCmGmGmCmGmGmAmAm
AmCmGmCmCmGmGmCAAGUUAAAAUAAGGCUAGUCCGUUAUCAmAmCmUmUmGmAmAmAmAm
AmGmUmGmGmCmAmCmCmGmAmGmUmCmGmGmUmGmCmUsmUsmUsmU;
  (SEQ ID NOs: 584)
mAsmUsmCsGACAAGAAAGGGACUGAGUUUUAGAmGmCmUmAmGmAmAmAmUmAmGmCAAGU
UAAAAUAAGGCUAGUCCGUUAmUmCAAmCmUmUGGACUUCGGUCCmAmAmGmUmGGmCmAmC
mCmGmAmGmUmCmGmGmUmGmCmUsmUsmUsmU;
or
  (SEQ ID NO: 585)
mAsmUsmCsGACAAGAAAGGGACUGAGUUUUAGAmGmCmCmGmGmCmGmGmAmAmAmCmGmC
mCmGmGmCAAGUUAAAAUAAGGCUAGUCCGUUAmUmCAAmCmUmUGGACUUCGGUCCmAmAm
GmUmGGmCmAmCmCmGmAmGmUmCmGmGmUmGmCmUmUmUmU;
```

[0035] where “N” represents any nucleotide, “mN” indicates a 2′-OMe modification of the nucleotide “N”, fN indicates a 2′-fluoro(F) modification of the nucleotide “N,” and “Ns” indicates that the nucleotide “N” is linked to the following nucleotide by a phosphorothioate. In any aspect of the disclosure, or embodiments thereof, the guide polynucleotide contains the following nucleotide sequence, from 5′ to 3′:

(SEQ ID NO: 586)
mAsmUsmCsGACAAGAAAGGGACUGAmGUUUUAGmAmGmCmUmAmGmAm
AmAmUmAmGmCmAmAGUUmAAmAAmUAmAmGmGmCmUmAGUmCmCGUUA
mUmCAAmCmUmUmGmAmAmAmAmAmGUGGmCmAmCmCmGmAmGmUmCmG
mGmUmGmCmUsmUsmUsmU;

[0036] where “N” represents any nucleotide, “mN” indicates a 2′-OMe modification of the nucleotide “N”, and “Ns” indicates that the nucleotide “N” is linked to the following nucleotide by a phosphorothioate.

[0037] In any aspect of the disclosure, or embodiments thereof, the guide polynucleotide contains a nucleotide sequence that is at least 90%, 95%, 96%, 97%, 98%, 99%, or 100% identical to:

(SEQ ID NO: 324)
5′-GUUUUAGAGC UAGAAAUAGC AAGUUAAAAU AAGGCUAGUC
CGUUAUCAAC UUGAAAAAGU GGCACCGAGU CGGUGCUUUU-3′

[0038] In any aspect of the disclosure, or embodiments thereof, the one or more guide RNAs is any of the guide polynucleotides of any aspect of the disclosure, or embodiments thereof.

[0039] In any aspect of the disclosure, or embodiments thereof, the base editor has a PAM specificity for the nucleotide sequence 5″-NGC-3′.

[0040] In any aspect of the disclosure, or embodiments thereof, the editing is in a cell. In any aspect of the disclosure, or embodiments thereof, the cell is in vivo or ex vivo.

[0041] In any aspect of the disclosure, or embodiments thereof, the alteration is a A•T to G•C alteration at the SNP associated with alpha-1 antitrypsin deficiency and changes a lysine at amino acid position 342 of an alpha-1 antitrypsin polypeptide encoded by the alpha-1 antitrypsin polynucleotide to glutamic acid. In any aspect of the disclosure, or embodiments thereof, the SNP associated with alpha-1 antitrypsin deficiency results in expression of an alpha-1 antitrypsin polypeptide having a lysine at amino acid position 342. In any aspect of the disclosure, or embodiments thereof, the SNP associated with alpha-1 antitrypsin deficiency results in the substitution of a glutamic acid amino acid with a lysine in the alpha-antitrypsin polypeptide encoded by the alpha-1 antitrypsin polynucleotide.

[0042] In any aspect of the disclosure, or embodiments thereof, the base editor is in complex with a single guide RNA (sgRNA) containing a nucleotide sequence complementary to an alpha-1 antitrypsin nucleotide sequence containing the SNP associated with alpha-1 antitrypsin deficiency.

[0043] In any aspect of the disclosure, or embodiments thereof, the one or more guide polynucleotides contain a guide polynucleotide of any aspect of the disclosure, or embodiments thereof.

[0044] In any aspect of the disclosure, or embodiments thereof, the cell produced is a hepatocyte or progenitor thereof. In any aspect of the disclosure, or embodiments thereof, the cell is from a subject having alpha-1 antitrypsin deficiency. In any aspect of the disclosure, or embodiments thereof, the cell is a mammalian cell or human cell.

[0045] In any aspect of the disclosure, or embodiments thereof, the A•T to G•C alteration at the SNP associated with alpha-1 antitrypsin deficiency results in the substitution of a lysine with a glutamic acid in an alpha-antitrypsin polypeptide encoded by an alpha-1 antitrypsin polynucleotide containing the SNP.

[0046] In any aspect of the disclosure, or embodiments thereof, the cell is selected for the A•T to G•C alteration of the SNP associated with alpha-1 antitrypsin deficiency.

[0047] In any aspect of the disclosure, or embodiments thereof, the one or more guide polynucleotides contain a CRISPR RNA (crRNA) and a trans-encoded small RNA (tracrRNA). The crRNA contains a nucleotide sequence complementary to an alpha-1 antitrypsin nucleic acid sequence containing the SNP associated with alpha-1 antitrypsin deficiency.

[0048] In any aspect of the disclosure, or embodiments thereof, the base editor and the one or more guide polynucleotides forms a complex in the cell.

[0049] In any aspect of the disclosure, or embodiments thereof, the base editor is in complex with a single guide RNA (sgRNA) containing a nucleotide sequence complementary to an alpha-1 antitrypsin nucleotide sequence containing the SNP associated with alpha-1 antitrypsin deficiency.

[0050] In any aspect of the disclosure, or embodiments thereof, the cell is autologous to the subject. In any aspect of the disclosure, or embodiments thereof, the cell is allogenic to the subject.

[0051] In any aspect of the disclosure, or embodiments thereof, the one or more guide polynucleotides is the guide polynucleotide of any aspect of the disclosure, or embodiments thereof.

[0052] In any aspect of the disclosure, or embodiments thereof, the hepatocyte or hepatocyte progenitor is a mammalian cell or human cell.

[0053] In any aspect of the disclosure, or embodiments thereof, the cell is selected for the A•T to G•C alteration of the SNP associated with alpha-1 antitrypsin deficiency.

[0054] In any aspect of the disclosure, or embodiments thereof, the base editor and the one or more guide polynucleotides forms a complex in the cell. In any aspect of the disclosure, or embodiments thereof, the base editor is in complex with a single guide RNA (sgRNA) containing a nucleotide sequence complementary to an alpha-1 antitrypsin nucleotide sequence containing the SNP associated with alpha-1 antitrypsin deficiency.

[0055] In any aspect of the disclosure, or embodiments thereof, the A•T to G•C alteration at the SNP associated with A1AD changes a lysine at amino acid position 342 of an alpha-1 antitrypsin polypeptide encoded by the alpha-1 antitrypsin polynucleotide to glutamic acid. In any aspect of the disclosure, or embodiments thereof, the SNP associated with A1AD results in expression of an alpha-1 antitrypsin polypeptide having a lysine at amino acid position 342.

[0056] In any aspect of the disclosure, or embodiments thereof, the method further involves effecting a deamination of the SNP associated with A1AD.

[0057] In any aspect of the disclosure, or embodiments thereof, the A•T to G•C alteration replaces a target nucleobase with a wild type nucleobase or with a non-wild type nucleobase, and where the replacing ameliorates symptoms of A1AD. In any aspect of the disclosure, or embodiments thereof, the A•T to G•C alteration results in the substitution of a glutamic acid amino acid with a lysine in an alpha-antitrypsin polypeptide encoded by an alpha-1 antitrypsin polynucleotide. In any aspect of the disclosure, or embodiments thereof, the A•T to G•C alteration is 1-20 nucleobases away from an NGC PAM sequence in a polynucleotide sequence targeted by the one or more guide polynucleotides. In any aspect of the disclosure, or embodiments thereof, the A•T to G•C alteration is 14 nucleobases upstream of the PAM sequence. In any aspect of the disclosure, or embodiments thereof, the PAM sequence is AGC.

[0058] In any aspect of the disclosure, or embodiments thereof, the subject is a non-human mammal or a human.

[0059] In any aspect of the disclosure, or embodiments thereof, the composition or pharmaceutical compositin further contains a lipid. In embodiments, the lipid is a cationic lipid.

[0060] In any aspect of the disclosure, or embodiments thereof, the kit further contains a package insert with instructions for use.

[0061] In any aspect of the disclosure, or embodiments thereof, the variant does not contain an N-terminal methionine.

[0062] In any aspect provided herein, or embodiments thereof, the method is not a process for modifying the germline genetic identity of human beings.

### Definitions

[0063] Unless defined otherwise, all technical and scientific terms used herein have the meaning commonly understood by a person skilled in the art to which this disclosure belongs.

[0064] The following references provide one of skill with a general definition of many of the terms used in this disclosure: Singleton et al., Dictionary of Microbiology and Molecular Biology (2nd ed. 1994); The Cambridge Dictionary of Science and Technology (Walker ed., 1988); The Glossary of Genetics, 5th Ed., R. Rieger et al. (eds.), Springer Verlag (1991); and Hale & Marham, The Harper Collins Dictionary of Biology (1991). As used herein, the following terms have the meanings ascribed to them below, unless specified otherwise.

[0065] By “adenine” or “9H-Purin-6-amine” is meant a purine nucleobase with the molecular formula C₅H₅N₅, having the structure

[chemical structure]

and corresponding to CAS No. 73-24-5.

[0066] By “adenosine” or “4-Amino-1-[(2R,3R,4S,5R)-3,4-dihydroxy-5-(hydroxymethyl)oxolan-2-yl]pyrimidin-2(1H)-one” is meant an adenine molecule attached to a ribose sugar via a glycosidic bond, having the structure

[chemical structure]

and corresponding to CAS No. 65-46-3. Its molecular formula is C₁₀H₁₃N₅O₄.

[0067] By “adenosine deaminase” or “adenine deaminase” is meant a polypeptide or fragment thereof capable of catalyzing the hydrolytic deamination of adenine or adenosine. In some embodiments, the deaminase or deaminase domain is an adenosine deaminase catalyzing the hydrolytic deamination of adenosine to inosine or deoxy adenosine to deoxyinosine. In some embodiments, the adenosine deaminase catalyzes the hydrolytic deamination of adenine or adenosine in deoxyribonucleic acid (DNA). The adenosine deaminases (e.g., engineered adenosine deaminases, evolved adenosine deaminases) provided herein may be from any organism (e.g., eukaryotic, prokaryotic), including but not limited to algae, bacteria, fungi, plants, invertebrates (e.g., insects), and vertebrates (e.g., amphibians, mammals). In some embodiments, the adenosine deaminase is an adenosine deaminase variant with one or more alterations and is capable of deaminating both adenine and cytosine in a target polynucleotide (e.g., DNA, RNA) and may be referred to as a “dual deaminase”. Non-limiting examples of dual deaminases include those described in PCT/US22/22050. In some embodiments, the target polynucleotide is single or double stranded. In some embodiments, the adenosine deaminase variant is capable of deaminating both adenine and cytosine in DNA. In some embodiments, the adenosine deaminase variant is capable of deaminating both adenine and cytosine in single-stranded DNA. In some embodiments, the adenosine deaminase variant is capable of deaminating both adenine and cytosine in RNA. In embodiments, the adenosine deaminase variant is selected from those described in PCT/US2020/018192, PCT/US2020/049975, PCT/US2017/045381, PCT/US2020/018195, and PCT/US2020/028568, the full contents of which are each incorporated herein by reference in their entireties for all purposes.

[0068] In some embodiments, the adenosine deaminase comprises at least one alteration in the following sequence: MSEVEFSHEYWMRHALTLAKRARDEREVPVGAVLVLNNRVIGEGWNRAIGLHDPTAHAE IMA LRQGGLVMQNYRLIDATLYVTFEPCVMCAGAMIHSRIGRVVFGVRNAKTGAAGSLMDVLHYP GMNHRVE ITEGILADECAALLCYFFRMPRQVFNAQKKAQSSTD (also termed TadA*7.10) (SEQ ID NO: 1). In the interest of clarity, residues L36, 176, V82, Y147, Q154, and N157 are indicated by bold and underlined text.

[0069] In some embodiments, TadA*7.10 comprises at least one amino acid alteration. In some embodiments, TadA*7.10 comprises an alteration in any one of amino acid residues L36, 176, V82, Y147, Q154, and N157 of TadA*7.10. In some embodiments, TadA*7.10 comprises any one of the amino acid alterations L36H, I76Y, V82T, Y147T, Q154S, and N157K of TadA*7.10.

In some embodiments, TadA*7.10 comprises the amino acid alterations L36H, I76Y, V82T, Y147T, Q154S, and N157K of TadA*7.10. For example, the TadA may have a sequence of SEVEFSHEYWMRHALTLAKRARDEREVPVGAVLVHNNRVIGEGWNRAIGLHDPTAHAEIMAL RQGGLVMQNYRLYDATLYTTFEPCVMCAGAMIHSRIGRVVFGVRNAKTGAAGSLMDVLHYPG MNHRVEITEGILADECAALLCTFFRMPRSVFKAQKKAQSSTD (SEQ ID NO: 426).

[0070] By “adenosine deaminase activity” is meant catalyzing the deamination of adenine or adenosine to guanine in a polynucleotide. In some embodiments, an adenosine deaminase variant as provided herein maintains adenosine deaminase activity (e.g., at least about 30%, 40%, 50%, 60%, 70%, 80%, 90% or more of the activity of a reference adenosine deaminase (e.g., TadA*8.20 or TadA*8.19)).

[0071] By “Adenosine Base Editor (ABE)” is meant a base editor comprising an adenosine deaminase.

[0072] By “Adenosine Base Editor (ABE) polynucleotide” is meant a polynucleotide encoding an ABE. By “Adenosine Base Editor 8 (ABE8) polypeptide” or “ABE8” is meant a base editor as defined herein comprising an adenosine deaminase or adenosine deaminase variant comprising one or more of the alterations listed in Table 5B, one of the combinations of alterations listed in Table 5B, or an alteration at one or more of the amino acid positions listed in Table 5B, where such alterations are relative to the following reference sequence: MSEVEFSHEYWMRHALTLAKRARDEREVPVGAVLVLNNRVIGEGWNRAIGLHDPTAHAE IMA LRQGGLVMQNYRLIDATLYVTFEPCVMCAGAMIHSRIGRVVFGVRNAKTGAAGSLMDVLHYP GMNHRVEITEGILADECAALLCYFFRMPRQVFNAQKKAQSSTD (SEQ ID NO: 1), or a corresponding position in another adenosine deaminase. In embodiments, ABE8 comprises alterations at amino acids 82 and/or 166 of SEQ ID NO: 1 In some embodiments, ABE8 comprises further alterations, as described herein, relative to the reference sequence.

[0073] By “Adenosine Base Editor 8 (ABE8) polynucleotide” is meant a polynucleotide encoding an ABE8 polypeptide.

[0074] “Administering” is referred to herein as providing one or more compositions described herein to a patient or a subject. By way of example and without limitation, composition administration (e.g., injection) can be performed by intravenous (i.v.) injection, sub-cutaneous (s.c.) injection, intradermal (i.d.) injection, intraperitoneal (i.p.) injection, or intramuscular (i.m.) injection. One or more such routes can be employed. Parenteral administration can be, for example, by bolus injection or by gradual perfusion over time. In some embodiments, parenteral administration includes infusing or injecting intravascularly, intravenously, intramuscularly, intraarterially, intrathecally, intratumorally, intradermally, intraperitoneally, transtracheally, subcutaneously, subcuticularly, intraarticularly, subcapsularly, subarachnoidly and intrasternally. Alternatively, or concurrently, administration can be by the oral route.

[0075] By “agent” is meant any small molecule chemical compound, antibody, nucleic acid molecule, or polypeptide, or fragments thereof.

[0076] By “alpha-1 antitrypsin (A1AT) protein” or “Homo sapiens serpin family A member 1 (SERPINA1) polypeptide” is meant a polypeptide or fragment thereof having at least about 85% amino acid sequence identity to NCBI Ref Seq Accession No. NP_000286.3. In some embodiments, the A1AT protein has protease inhibition activity. In particular embodiments, an A1AT protein comprises one or more alterations (e.g., at E342) relative to the following reference sequence or a corresponding amino acid sequence. In some embodiments, the alteration reduces or eliminates A1AT protease inhibition activity and/or disrupts protein folding. In one particular embodiment, an A1AT protein associated with A1AD comprises an E342K mutation, where the position of the mutation is indicated relative to a mature A1AT protein that does not include the signal peptide underlined in the below sequence. An exemplary A1AT amino acid sequence is provided below, where a signal peptide is shown as plain underlined text, and position E342 is indicated in bold-underlined text.

>NP_000286.3 alpha-1-antitrypsin precursor [Homo sapiens]
(SEQ ID NO: 427)
MPSSVSWGILLLAGLCCLVPVSLAEDPQGDAAQKTDTSHHDQDHPTFNKITPNLAEFAFSLY
RQLAHQSNSTNIFFSPVSIATAFAMLSLGTKADTHDEILEGLNFNLTEIPEAQIHEGFQELL
RTLNQPDSQLQLTTGNGLFLSEGLKLVDKFLEDVKKLYHSEAFTVNFGDTEEAKKQINDYVE
KGTQGKIVDLVKELDRDTVFALVNYIFFKGKWERPFEVKDTEEEDFHVDQVTTVKVPMMKRL
GMFNI QHCKKLSSWVLLMKYLGNATAIFFLPDEGKLQHLENELTHDIITKFLENEDRRSASL
HLPKLSITGTYDLKSVLGQLGITKVFSNGADLSGVTEEAPLKLSKAVHKAVLTIDEKGTEAA
GAMFLEAIPMSIPPEVKFNKPFVFLMIEQNTKSPLFMGKVVNPTQK

[0077] In the above A1AT protein sequence, the first 24 amino acids constitute the signal peptide (underlined). Position 342 of the sequence, which is mutated in A1AD (i.e., E342K), is determined based on setting amino acid residue “E” following the signal sequence as amino acid “1”.

[0078] By “alpha-1 antitrypsin (A1AT) polynucleotide” or “Homo sapiens serpin family A member 1 (SERPINA1) polynucleotide” is meant a nucleic acid molecule encoding an A1AT polypeptide, as well as the introns, exons, 3′ untranslated regions, 5′ untranslated regions, and regulatory sequences associated with its expression, or fragments thereof. In embodiments, an A1AT polynucleotide is the genomic sequence, cDNA, mRNA, or gene associated with and/or required for A1AT expression. An exemplary A1AT nucleotide sequence from Homo Sapiens is provided below (NCBI Accession No. NM_NM_000295). A representative A1AT gene sequence is provided at ENSEMBL Accession No. ENSG00000197249, which is proved below. A further representative A1AT gene sequence is provided below corresponding to NCBI RefSeq Accession No. NM_000295.

```
>NM_000295.5:48-1304 Homo sapiens serpin family A member 1 (SERPINA1), transcript
variant 1, mRNA. In embodiments, the methods of the disclosure involve deaminating
a nucleobase corresponding to the nucleobase shown as bold-underlined text in the
below sequence.
  (SEQ ID NO: 428)
ATGCCGTCTTCTGTCTCGTGGGGCATCCTCCTGCTGGCAGGCCTGTGCTGCCTGGTCCCTGT
CTCCCTGGCTGAGGATCCCCAGGGAGATGCTGCCCAGAAGACAGATACATCCCACCATGATC
AGGATCACCCAACCTTCAACAAGATCACCCCCAACCTGGCTGAGTTCGCCTTCAGCCTATAC
CGCCAGCTGGCACACCAGTCCAACAGCACCAATATCTTCTTCTCCCCAGTGAGCATCGCTAC
AGCCTTTGCAATGCTCTCCCTGGGGACCAAGGCTGACACTCACGATGAAATCCTGGAGGGCC
TGAATTTCAACCTCACGGAGATTCCGGAGGCTCAGATCCATGAAGGCTTCCAGGAACTCCTC
CGTACCCTCAACCAGCCAGACAGCCAGCTCCAGCTGACCACCGGCAATGGCCTGTTCCTCAG
CGAGGGCCTGAAGCTAGTGGATAAGTTTTTGGAGGATGTTAAAAAGTTGTACCACTCAGAAG
CCTTCACTGTCAACTTCGGGGACACCGAAGAGGCCAAGAAACAGATCAACGATTACGTGGAG
AAGGGTACTCAAGGGAAAATTGTGGATTTGGTCAAGGAGCTTGACAGAGACACAGTTTTTGC
TCTGGTGAATTACATCTTCTTTAAAGGCAAATGGGAGAGACCCTTTGAAGTCAAGGACACCG
AGGAAGAGGACTTCCACGTGGACCAGGTGACCACCGTGAAGGTGCCTATGATGAAGCGTTTA
GGCATGTTTAACATCCAGCACTGTAAGAAGCTGTCCAGCTGGGTGCTGCTGATGAAATACCT
GGGCAATGCCACCGCCATCTTCTTCCTGCCTGATGAGGGGAAACTACAGCACCTGGAAAATG
AACTCACCCACGATATCATCACCAAGTTCCTGGAAAATGAAGACAGAAGGTCTGCCAGCTTA
CATTTACCCAAACTGTCCATTACTGGAACCTATGATCTGAAGAGCGTCCTGGGTCAACTGGG
CATCACTAAGGTCTTCAGCAATGGGGCTGACCTCTCCGGGGTCACAGAGGAGGCACCCCTGA
AGCTCTCCAAGGCCGTGCATAAGGCTGTGCTGACCATCGACGAGAAAGGGACTGAAGCTGCT
GGGGCCATGTTTTTAGAGGCCATACCCATGTCTATCCCCCCCGAGGTCAAGTTCAACAAACC
CTTTGTCTTCTTAATGATTGAACAAAATACCAAGTCTCCCCTCTTCATGGGAAAAGTGGTGA
ATCCCACCCAAAAATAA.
>ENSG00000197249; chromosome: GRCh38:14:94376147:94391293:-1 (exons are shown in bold
text). In embodiments, the methods of the disclosure involve deaminating a nucleobase
corresponding to the nucleobase shown as bold-underlined text in the below sequence.
In embodiments, an NGC PAM sequence associated with deamination of the nucleobase
according to the methods provided herein corresponds to the nucleotides shown as
double-underlined plain text in the below sequence.
  (SEQ ID NO: 429)
TGGTGCGTTTTTCCAGATTATCCTAGCCCTTCCTCCCAGGATGGATGTCCAGAGCAGGGCGG
GGGCTGAGCCTAGAGCCCTGCCAAAAGAGCAGGACCCCAAATTCTGAGCCCCTTACTTGCCT
CACCTGCTCCCACCCATGCTTTCTTCATTCCTCCTCCAAAAGCCCCAGCTCCCCACTGCAAT
CCCTTCTGCACCCAGCCAGGTCCTATGACACACACCTCCCCAGTGCACACAGACCTGCCCAA
CTGTGGGGCTGCCCACTGGGCATTTCATAGGTGGCTCAGTCCTCTTCCCTCTGCAGCTGGCC
CCAGAAACCTGCCAGTTATTGGTGCCAGGTCTGTGCCAGGAGGGCGAGGCCTGTCATTTCTA
GTAATCCTCTGGGCAGTGTGACTGTACCTCTTGCGGCAACTCAAAGGGAGAGGGTGACTTGT
CCCGGGTCACAGAGCTGAAAGGGCAGGTACAACAGGTGACATGCCGGGCTGTCTGAGTTTAT
GAGGGCCCAGTCTTGTGTCTGCCGGGCAATGAGCAAGGCTCCTTCCTGTCCAAGCTCCCCGC
CCCTCCCCAGCCTACTGCCTCCACCCGAAGTCTACTTCCTGGGTGGGCAGGAACTGGGCACT
GTGCCCAGGGCATGCACTGCCTCCACGCAGCAACCCTCAGAGTCCTGAGCTGAACCAAGAAG
GAGGAGGGGGTCGGGCCTCCGAGGAAGGCCTAGCCGCTGCTGCTGCCAGGAATTCCAGGTTG
GAGGGGCGGCAACCTCCTGCCAGCCTTCAGGCCACTCTCCTGTGCCTGCCAGAAGAGACAGA
GCTTGAGGAGAGCTTGAGGAGAGCAGGAAAGGTGGGACATTGCTGCTGCTGCTCACTCAGTT
CCACAGGTGGGAGGGACAGCAGGGCTTAGAGTGGGGGTCATTGTGCAGATGGGAAAACAAAG
GCCCAGAGAGGGGAAGAAATGCCCAGGAGCTACCGAGGGCAGGCGACCTCAACCACAGCCCA
GTGCTGGAGCTGTGAGTGGATGTAGAGCAGCGGAATATCCATTCAGCCAGCTCAGGGGAAGG
ACAGGGGCCCTGAAGCCAGGGGATGGAGCTGCAGGGAAGGGAGCTCAGAGAGAAGGGGAGGG
GAGTCTGAGCTCAGTTTCCCGCTGCCTGAAAGGAGGGTGGTACCTACTCCCTTCACAGGGTA
ACTGAATGAGAGACTGCCTGGAGGAAAGCTCTTCAAGTGTGGCCCACCCCACCCCAGTGACA
CCAGCCCCTGACACGGGGGAGGGAGGGCAGCATCAGGAGGGGCTTTCTGGGCACACCCAGTA
CCCGTCTCTGAGCTTTCCTTGAACTGTTGCATTTTAATCCTCACAGCAGCTCAACAAGGTAC
ATACCGTCACCATCCCCATTTTACAGATAGGGAAATTGAGGCTCGGAGCGGTTAAACAACTC
ACCTGAGGCCTCACAGCCAGTAAGTGGGTTCCCTGGTCTGAATGTGTGTGCTGGAGGATCCT
GTGGGTCACTCGCCTGGTAGAGCCCCAAGGTGGAGGCATAAATGGGACTGGTGAATGACAGA
AGGGGCAAAAATGCACTCATCCATTCACTCTGCAAGTATCTACGGCACGTACGCCAGCTCCC
AAGCAGGTTTGCGGGTTGCACAGCGGGCGATGCAATCTGATTTAGGCTTTTAAAGGGATTGC
AATCAAGTGGGGCCCCACTAGCCTCAACCCTGTACCTCCCCTCCCCTCCACCCCCAGCAGTC
TCCAAAGGCCTCCAACAACCCCAGAGTGGGGGCCATGTATCCAAAGAAACTCCAAGCTGTAT
ACGGATCACACTGGTTTTCCAGGAGCAAAAACAGAAACAGGCCTGAGGCTGGTCAAAATTGA
ACCTCCTCCTGCTCTGAGCAGCCTGGGGGGCAGACTAAGCAGAGGGCTGTGCAGACCCACAT
AAAGAGCCTACTGTGTGCCAGGCACTTCACCCGAGGCACTTCACAAGCATGCTTGGGAATGA
AACTTCCAACTCTTTGGGATGCAGGTGAAACAGTTCCTGGTTCAGAGAGGTGAAGCGGCCTG
CCTGAGGCAGCACAGCTCTTCTTTACAGATGTGCTTCCCCACCTCTACCCTGTCTCACGGCC
CCCCATGCCAGCCTGACGGTTGTGTCTGCCTCAGTCATGCTCCATTTTTCCATCGGGACCAT
CAAGAGGGTGTTTGTGTCTAAGGCTGACTGGGTAACTTTGGATGAGCGGTCTCTCCGCTCTG
AGCCTGTTTCCTCATCTGTCAAATGGGCTCTAACCCACTCTGATCTCCCAGGGCGGCAGTAA
GTCTTCAGCATCAGGCATTTTGGGGTGACTCAGTAAATGGTAGATCTTGCTACCAGTGGAAC
AGCCACTAAGGATTCTGCAGTGAGAGCAGAGGGCCAGCTAAGTGGTACTCTCCCAGAGACTG
TCTGACTCACGCCACCCCCTCCACCTTGGACACAGGACGCTGTGGTTTCTGAGCCAGGTACA
ATGACTCCTTTCGGTAAGTGCAGTGGAAGCTGTACACTGCCCAGGCAAAGCGTCCGGGCAGC
GTAGGCGGGCGACTCAGATCCCAGCCAGTGGACTTAGCCCCTGTTTGCTCCTCCGATAACTG
GGGTGACCTTGGTTAATATTCACCAGCAGCCTCCCCCGTTGCCCCTCTGGATCCACTGCTTA
AATACGGACGAGGACAGGGCCCTGTCTCCTCAGCTTCAGGCACCACCACTGACCTGGGACAG
TGAATCGTAAGTATGCCTTTCACTGCGAGAGGTTCTGGAGAGGCTTCTGAGCTCCCCATGGC
CCAGGCAGGCAGCAGGTCTGGGGCAGGAGGGGGGTTGTGGAGTGGGTATCCGCCTGCTGAGG
TGCAGGGCAGATGGAGAGGCTGCAGCTGAGCTCCTATTTTCATAATAACAGCAGCCATGAGG
GTTGTGTCCTGTTTCCCAGTCCTGCCCGGTCCCCCCTCGGTACCTCCTGGTGGATACACTGG
TTCCTGTAAGCAGAAGTGGATGAGGGTGTCTAGGTCTGCAGTCCTGGCACCCCAGGATGGGG
GACACCAGCCAAGATACAGCAACAGCAACAAAGCGCAGCCATTTCTTTCTGTTTGCACAGCT
CCTCTGTCTGTCGGGGGCTCCTGTCTGTTGTCTCCTATAAGCCTCACCACCTCTCCTACTGC
TTGGGCATGCATCTTTCTCCCCTTCTATAGATGAGGAGGTTAAGGTCCAGAGAGGGGTGGGG
AGGAACGCCGGCTCACATTCTCCATCCCCTCCAGATATGACCAGGAACAGACCTGTGCCAGG
CCTCAGCCTTACATCAAAATGGGCCTCCCCATGCACCGTGGACCTCTGGGCCCTCCTGTCCC
AGTGGAGGACAGGAAGCTGTGAGGGGCACTGTCACCCAGGGCTCAAGCTGGCATTCCTGAAT
AATCGCTCTGCACCAGGCCACGGCTAAGCTCAGTGCGTGATTAAGCCTCATAACCCTCCAAG
GCAGTTACTAGTGTGATTCCCATTTTACAGATGAGGAAGATGGGGACAGAGAGGTGAATAAC
TGGCCCCAAATCACACACCATCCATAATTCGGGCTCAGGCACCTGGCTCCAGTCCCCAAACT
CTTGAACCTGGCCCTAGTGTCACTGTTTCTCTTGGGTCTCAGGCGCTGGATGGGGAACAGGA
AACCTGGGCTGGACTTGAGGCCTCTCTGATGCTCGGTGACTTCAGACAGTTGCTCAACCTCT
CTGTTCTCTTGGGCAAAACATGATAACCTTTGACTTCTGTCCCCTCCCCTCACCCCACCCGA
CCTTGATCTCTGAAGTGTTGGAAGGATTTAATTTTTCCTGCACTGAGTTTTGGAGACAGGTC
AAAAAGATGACCAAGGCCAAGGTGGCCAGTTTCCTATAGAACGCCTCTAAAAGACCTGCAGC
AATAGCAGCAAGAACTGGTATTCTCGAGAACTTGCTGCGCAGCAGGCACTTCTTGGCATTTT
ATGTGTATTTAATTTCACAATAGCTCTATGACAAAGTCCACCTTTCTCATCTCCAGGAAACT
GAGGTTCAGAGAGGTTAAGTAACTTGTCCAAGGTCACACAGCTAATAGCAAGTTGACGTGGA
GCAATCTGGCCTCAGAGCCTTTAATTTTAGCCACAGACTGATGCTCCCCTCTTCATTTAGCC
AGGCTGCCTCTGAAGTTTTCTGATTCAAGACTTCTGGCTTCAGCTTTGTACACAGAGATGAT
TCAATGTCAGGTTTTGGAGTGAAATCTGTTTAATCCCAGACAAAACATTTAGGATTACATCT
CAGTTTTGTAAGCAAGTAGCTCTGTGATTTTTAGTGAGTTATTTAATGCTCTTTGGGGCTCA
ATTTTTCTATCTATAAAATAGGGCTAATAATTTGCACCTTATAGGGTAAGCTTTGAGGACAG
ATTAGATGATACGGTGCCTGTAAAACACCAGGTGTTAGTAAGTGTGGCAATGATGGTGACGC
TGAGGCTGATGTTTGCTTAGCATAGGGTTAGGCAGCTGGCAGGCAGTAAACAGTTGGATAAT
TTAATGGAAAATTTGCCAAACTCAGATGCTGTTCACTGCTGAGCAGGAGCCCCTTCCTGCTG
AAATGGTCCTGGGGAGTGCAGCAGGCTCTCCGGGAAGAAATCTACCATCTCTCGGGCAGGAG
CTCAACCTGTGTGCAGGTACAGGGAGGGCTTCCTCACCTGGTGCCCACTCATGCATTACGTC
AGTTATTCCTCATCCCTGTCCAAAGGATTCTTTTCTCCATTGTACAGCTATGAAGCTAGTGC
TCAAAGAAGTGAAGTCATTTACCCCAGGCCCCCTGCCAGTAAGTGACAGGGCCTGGTCACAC
TTGGGTTTATTTATTGCCCAGTTCAACAGGTTGTTTGACCATAGGCGAGATTCTCTTCCCTG
CACCCTGCCGGGTTGCTCTTGGTCCCTTATTTTATGCTCCCGGGTAGAAATGGTGTGAGATT
AGGCAGGGAGTGGCTCGCTTCCCTGTCCCTGGCCCCGCAAAGAGTGCTCCCACCTGCCCCGA
TCCCAGAAATGTCACCATGAAGCCTTCATTCTTTTGGTTTAAAGCTTGGCCTCAGTGTCCGT
ACACCATGGGGTACTTGGCCAGATGGCGACTTTCTCCTCTCCAGTCGCCCTCCCAGGCACTA
GCTTTTAGGAGTGCAGGGTGCTGCCTCTGATAGAAGGGCCAGGAGAGAGCAGGTTTTGGAGT
CCTGATGTTATAAGGAACAGCTTGGGAGGCATAATGAACCCAACATGATGCTTGAGACCAAT
GTCACAGCCCAATTCTGACATTCATCATCTGAGATCTGAGGACACAGCTGTCTCAGTTCATG
ATCTGAGTGCTGGGAAAGCCAAGACTTGTTCCAGCTTTGTCACTGACTTGCTGTATAGCCTC
AACAAGGCCCTGACCCTCTCTGGGCTTCAAACTCTTCACTGTGAAAGGAGGAAACCAGAGTA
GGTGATGTGACACCAGGAAAGATGGATGGGTGTGGGGGAATGTGCTCCTCCCAGCTGTCACC
CCCTCGCCACCCTCCCTGCACCAGCCTCTCCACCTCCTTTGAGCCCAGAATTCCCCTGTCTA
GGAGGGCACCTGTCTCATGCCTAGCCATGGGAATTCTCCATCTGTTTTGCTACATTGAACCC
AGATGCCATTCTAACCAAGAATCCTGGCTGGGTGCAGGGGCTCTCGCCTGTAACCCCAGCAC
TTTGGGAGGCCAAGGCAGGCGGATCAAGAGGTCAGGAGTTCAAGACCTGCCTGGCCAACACG
GTGAAACCTCAGCTCTACTAAAAATACAAAAATTAGCCAGGCGTGGTGGCACACGCCTGTAA
TCCCAGCTATTTGGGAAGCTGAGACAGAAGAATTTCTTGAACCCGGGAGGTGGAGGTTTCAG
TGAGCCGAGATCACGCCACTGCACTCCACCCTGGCAGATAAAGCGAGACTCTGTCTCAAAAA
AAACCCAAAAACCTATGTTAGTGTACAGAGGGCCCCAGTGAAGTCTTCTCCCAGCCCCACTT
TGCACAACTGGGGAGAGTGAGGCCCCAGGACCAGAGGATTCTTGCTAAAGGCCAAGTGGATA
GTGATGGCCCTGCCAGGGCTAGAAGCCACAACCTCTGGCCCTGAGGCCACTCAGCATATTTA
GTGTCCCCACCCTGCAGAGGCCCAACTCCCTCCTGACCACTGAGCCCTGTAATGATGGGGGA
ATTTCCATAAGCCATGAAGGACTGCACAAAGTTCAGTTGGGAAGTGAAAGAGAAATTAAAGG
GAGATGGAAATATACAGCACTAATTTTAGCACCGTCTTTAGTTCTAACAACACTAGCTAGCT
GAAGAAAAATACAAACATGTATTATGTAATGTGTGGTCTGTTCCATTTGGATTACTTAGAGG
CACGAGGGCCAGGAGAAAGGTGGTGGAGAGAAACCAGCTTTGCACTTCATTTGTTGCTTTAT
TGGAAGGAAACTTTTAAAAGTCCAAGGGGGTTGAAGAATCTCAATATTTGTTATTTCCAGCT
TTTTTTCTCCAGTTTTTCATTTCCCAAATTCAAGGACACCTTTTTCTTTGTATTTTGTTAAG
ATGATGGTTTTGGTTTTGTGACTAGTAGTTAACAATGTGGCTGCCGGGCATATTCTCCTCAG
CTAGGACCTCAGTTTTCCCATCTGTGAAGACGGCAGGTTCTACCTAGGGGGCTGCAGGCTGG
TGGTCCGAAGCCTGGGCATATCTGGAGTAGAAGGATCACTGTGGGGCAGGGCAGGTTCTGTG
TTGCTGTGGATGACGTTGACTTTGACCATTGCTCGGCAGAGCCTGCTCTCGCTGGTTCAGCC
ACAGGCCCCACCACTCCCTATTGTCTCAGCCCCGGGTATGAAACATGTATTCCTCACTGGCC
TATCACCTGAAGCCTTTGAATTTGCAACACCTGCCAACCCCTCCCTCAAAAGAGTTGCCCTC
TCAGATCCTTTTGATGTAAGGTTTGGTGTTGAGACTTATTTCACTAAATTCTCATACATAAA
CATCACTTTATGTATGAGGCAAAATGAGGACCAGGGAGATGAATGACTTGTCCTGGCTCATA
CACCTGGAAAGTGACAGAGTCAGATTAGATCCCAGGTCTATCTGAAGTTAAAAGAGGTGTCT
TTTCACTTCCCACCTCCTCCATCTACTTTAAAGCAGCACAAACCCCTGCTTTCAAGGAGAGA
TGAGCGTCTCTAAAGCCCCTGACAGCAAGAGCCCAGAACTGGGACACCATTAGTGACCCAGA
CGGCAGGTAAGCTGACTGCAGGAGCATCAGCCTATTCTTGTGTCTGGGACCACAGAGCATTG
TGGGGACAGCCCCGTCTCTTGGGAAAAAAACCCTAAGGGCTGAGGATCCTTGTGAGTGTTGG
GTGGGAACAGCTCCCAGGAGGTTTAATCACAGCCCCTCCATGCTCTCTAGCTGTTGCCATTG
TGCAAGATGCATTTCCCTTCTGTGCAGCAGTTTCCCTGGCCACTAAATAGTGGGATTAGATA
GAAGCCCTCCAAGGGCTTCCAGCTTGACATGATTCTTGATTCTGATCTGGCCCGATTCCTGG
ATAATCGTGGGCAGGCCCATTCCTCTTCTTGTGCCTCATTTTCTTCTTTTGTAAAACAATGG
CTGTACCATTTGCATCTTAGGGTCATTGCAGATGTAAGTGTTGCTGTCCAGAGCCTGGGTGC
AGGACCTAGATGTAGGATTCTGGTTCTGCTACTTCCTCAGTGACATTGAATAGCTGACCTAA
TCTCTCTGGCTTTGGTTTCTTCATCTGTAAAAGAAGGATATTAGCATTAGCACCTCACGGGA
TTGTTACAAGAAAGCAATGAATTAACACATGTGAGCACGGAGAACAGTGCTTGGCATATGGT
AAGCACTACGTACATTTTGCTATTCTTCTGATTCTTTCAGTGTTACTGATGTCGGCAAGTAC
TTGGCACAGGCTGGTTTAATAATCCCTAGGCACTTCCACGTGGTGTCAATCCCTGATCACTG
GGAGTCATCATGTGCCTTGACTCGGGGCCTGGCCCCCCCATCTCTGTCTTGCAGGACAATGC
CGTCTTCTGTCTCGTGGGGCATCCTCCTGCTGGCAGGCCTGTGCTGCCTGGTCCCTGTCTCC
CTGGCTGAGGATCCCCAGGGAGATGCTGCCCAGAAGACAGATACATCCCACCATGATCAGGA
TCACCCAACCTTCAACAAGATCACCCCCAACCTGGCTGAGTTCGCCTTCAGCCTATACCGCC
AGCTGGCACACCAGTCCAACAGCACCAATATCTTCTTCTCCCCAGTGAGCATCGCTACAGCC
TTTGCAATGCTCTCCCTGGGGACCAAGGCTGACACTCACGATGAAATCCTGGAGGGCCTGAA
TTTCAACCTCACGGAGATTCCGGAGGCTCAGATCCATGAAGGCTTCCAGGAACTCCTCCGTA
CCCTCAACCAGCCAGACAGCCAGCTCCAGCTGACCACCGGCAATGGCCTGTTCCTCAGCGAG
GGCCTGAAGCTAGTGGATAAGTTTTTGGAGGATGTTAAAAAGTTGTACCACTCAGAAGCCTT
CACTGTCAACTTCGGGGACACCGAAGAGGCCAAGAAACAGATCAACGATTACGTGGAGAAGG
GTACTCAAGGGAAAATTGTGGATTTGGTCAAGGAGCTTGACAGAGACACAGTTTTTGCTCTG
GTGAATTACATCTTCTTTAAAGGTAAGGTTGCTCAACCAGCCTGAGCTGTTCCCATAGAAAC
AAGCAAAAATATTCTCAAACCATCAGTTCTTGAACTCTCCTTGGCAATGCATTATGGGCCAT
AGCAATGCTTTTCAGCGTGGATTCTTCAGTTTTCTACACACAAACACTAAAATGTTTTCCAT
CATTGAGTAATTTGAGGAAATAATAGATTAAACTGTCAAAACTACTGACAGCTCTGCAGAAC
TTTTCAGAGCCTTTAATGTCCTTGTGTATACTGTATATGTAGAATATATAATGCTTAGAACT
ATAGAACAAATTGTAATACACTGCATAAAGGGATAGTTTCATGGAACATACTTTACACGACT
CTAGTGTCCCAGAATCAGTATCAGTTTTGCAATCTGAAAGACCTGGGTTCAAATCCTGCCTC
TAACACAATTAGCTTTTGACAAAAACAATGCATTCTACCTCTTTGAGGTGCTAATTTCTCAT
CTTAGCATGGACAAAATACCATTCTTGCTGTCAGGTTTTTTTAGGATTAAACAAATGACAAA
GACTGTGGGGATGGTGTGTGGCATACAGCAGGTGATGGACTCTTCTGTATCTCAGGCTGCCT
TCCTGCCCCTGAGGGGTTAAAATGCCAGGGTCCTGGGGGCCCCAGGGCATTCTAAGCCAGCT
CCCACTGTCCCAGGAAAACAGCATAGGGGAGGGGAGGTGGGAGGCAAGGCCAGGGGCTGCTT
CCTCCACTCTGAGGCTCCCTTGCTCTTGAGGCAAAGGAGGGCAGTGGAGAGCAGCCAGGCTG
CAGTCAGCACAGCTAAAGTCCTGGCTCTGCTGTGGCCTTAGTGGGGGCCCAGGTCCCTCTCC
AGCCCCAGTCTCCTCCTTCTGTCCAATGAGAAAGCTGGGATCAGGGGTCCCTGAGGCCCCTG
TCCACTCTGCATGCCTCGATGGTGAAGCTCTGTTGGTATGGCAGAGGGGAGGCTGCTCAGGC
ATCTGCATTTCCCCTGCCAATCTAGAGGATGAGGAAAGCTCTCAGGAATAGTAAGCAGAATG
TTTGCCCTGGATGAATAACTGAGCTGCCAATTAACAAGGGGCAGGGAGCCTTAGACAGAAGG
TACCAAATATGCCTGATGCTCCAACATTTTATTTGTAATATCCAAGACACCCTCAAATAAAC
ATATGATTCCAATAAAAATGCACAGCCACGATGGCATCTCTTAGCCTGACATCGCCACGATG
TAGAAATTCTGCATCTTCCTCTAGTTTTGAATTATCCCCACACAATCTTTTTCGGCAGCTTG
GATGGTCAGTTTCAGCACCTTTTACAGATGATGAAGCTGAGCCTCGAGGGATGTGTGTCGTC
AAGGGGGCTCAGGGCTTCTCAGGGAGGGGACTCATGGTTTCTTTATTCTGCTACACTCTTCC
AAACCTTCACTCACCCCTGGTGATGCCCACCTTCCCCTCTCTCCAGGCAAATGGGAGAGACC
CTTTGAAGTCAAGGACACCGAGGAAGAGGACTTCCACGTGGACCAGGTGACCACCGTGAAGG
TGCCTATGATGAAGCGTTTAGGCATGTTTAACATCCAGCACTGTAAGAAGCTGTCCAGCTGG
GTGCTGCTGATGAAATACCTGGGCAATGCCACCGCCATCTTCTTCCTGCCTGATGAGGGGAA
ACTACAGCACCTGGAAAATGAACTCACCCACGATATCATCACCAAGTTCCTGGAAAATGAAG
ACAGAAGGTGATTCCCCAACCTGAGGGTGACCAAGAAGCTGCCCACACCTCTTAGCCATGTT
GGGACTGAGGCCCATCAGGACTGGCCAGAGGGCTGAGGAGGGTGAACCCCACATCCCTGGGT
CACTGCTACTCTGTATAAACTTGGCTTCCAGAATGAGGCCACCACTGAGTTCAGGCAGCGCC
ATCCATGCTCCATGAGGAGGACAGTACCCAGGGGTGAGGAGGTAAAGGTCTCGTCCCTGGGG
ACTTCCCACTCCAGTGTGGACACTGTCCCTTCCCAATATCCAGTGCCCAGGGCAGGGACAGC
AGCACCACCACACGTTCTGGCAGAACCAAAAAGGAACAGATGGGCTTCCTGGCAAAGGCAGC
AGTGGAGTGTGGAGTTCAAGGGTAGAATGTCCCTGGGGGGACGGGGGAAGAGCCTGTGTGGC
AAGGCCCAGAAAAGCAAGGTTCGGAATTGGAACAGCCAGGCCATGTTCGCAGAAGGCTTGCG
TTTCTCTGTCACTTTATCGGTGCTGTTAGATTGGGTGTCCTGTAGTAAGTGATACTTAAACA
TGAGCCACACATTAGTGTATGTGTGTGCATTCGTGATTATGCCCATGCCCTGCTGATCTAGT
TCGTTTTGTACACTGTAAAACCAAGATGAAAATACAAAAGGTGTCGGGTTCATAATAGGAAT
CGAGGCTGGAATTTCTCTGTTCCATGCCAGCACCTCCTGAGGTCTCTGCTCCAGGGGTTGAG
AAAGAACAAAGAGGCTGAGAGGGTAACGGATCAGAGAGCCCAGAGCCAAGCTGCCCGCTCAC
ACCAGACCCTGCTCAGGGTGGCATTGTCTCCCCATGGAAAACCAGAGAGGAGCACTCAGCCT
GGTGTGGTCACTCTTCTCTTATCCACTAAACGGTTGTCACTGGGCACTGCCACCAGCCCCGT
GTTTCTCTGGGTGTAGGGCCCTGGGGATGTTACAGGCTGGGGGCCAGGTGACCCAACACTAC
AGGGCAAGATGAGACAGGCTTCCAGGACACCTAGAATATCAGAGGAGGTGGCATTTCAAGCT
TTTGTGATTCATTCGATGTTAACATTCTTTGACTCAATGTAGAAGAGCTAAAAGTAGAACAA
ACCAAAGCCGAGTTCCCATCTTAGTGTGGGTGGAGGACACAGGAGTAAGTGGCAGAAATAAT
CAGAAAAGAAAACACTTGCACTGTGGTGGGTCCCAGAAGAACAAGAGGAATGCTGTGCCATG
CCTTGAATTTCTTTTCTGCACGACAGGTCTGCCAGCTTACATTTACCCAAACTGTCCATTAC
TGGAACCTATGATCTGAAGAGCGTCCTGGGTCAACTGGGCATCACTAAGGTCTTCAGCAATG
GGGCTGACCTCTCCGGGGTCACAGAGGAGGCACCCCTGAAGCTCTCCAAGGTGAGATCACCC
TGACGACCTTGTTGCACCCTGGTATCTGTAGGGAAGAATGTGTGGGGGCTGCAGCTCTGTCC
TGAGGCTGAGGAAGGGGCCGAGGGAAACAAATGAAGACCCAGGCTGAGCTCCTGAAGATGCC
CGTGATTCACTGACACGGGACGTGGTCAAACAGCAAAGCCAGGCAGGGGACTGCTGTGCAGC
TGGCACTTTCGGGGCCTCCCTTGAGGTTGTGTCACTGACCCTGAATTTCAACTTTGCCCAAG
ACCTTCTAGACATTGGGCCTTGATTTATCCATACTGACACAGAAAGGTTTGGGCTAAGTTGT
TTCAAAGGAATTTCTGACTCCTTCGATCTGTGAGATTTGGTGTCTGAATTAATGAATGATTT
CAGCTAAAGATGACACTTATTTTGGAAAACTAAAGGCGACCAATGAACAACTGCAGTTCCAT
GAATGGCTGCATTATCTTGGGGTCTGGGCACTGTGAAGGTCACTGCCAGGGTCCGTGTCCTC
AAGGAGCTTCAAGCCGTGTACTAGAAAGGAGAGAGCCCTGGAGGCAGACGTGGAGTGACGAT
GCTCTTCCCTGTTCTGAGTTGTGGGTGCACCTGAGCAGGGGGAGAGGCGCTTGTCAGGAAGA
TGGACAGAGGGGAGCCAGCCCCATCAGCCAAAGCCTTGAGGAGGAGCAAGGCCTATGTGACA
GGGAGGGAGAGGATGTGCAGGGCCAGGGCCGTCCAGGGGGAGTGAGCGCTTCCTGGGAGGTG
TCCACGTGAGCCTTGCTCGAGGCCTGGGATCAGCCTTACAACGTGTCTCTGCTTCTCTCCCC
TCCAGGCCGTGCATAAGGCTGTGCTGACCATCGACGAGAAAGGGACTGAAGCTGCTGGGGCC
ATGTTTTTAGAGGCCATACCCATGTCTATCCCCCCCGAGGTCAAGTTCAACAAACCCTTTGT
CTTCTTAATGATTGAACAAAATACCAAGTCTCCCCTCTTCATGGGAAAAGTGGTGAATCCCA
CCCAAAAATAACTGCCTCTCGCTCCTCAACCCCTCCCCTCCATCCCTGGCCCCCTCCCTGGA
TGACATTAAAGAAGGGTTGAGCTGGTCCCTGCCTGCATGTGACTGTAAATCCCTCCCATGTT
TTCTCTGAGTCTCCCTTTGCCTGCTGAGGCTGTATGTGGGCTCCAGGTAACAGTGCTGTCTT
CGGGCCCCCTGAACTGTGTTCATGGAGCATCTGGCTGGGTAGGCACATGCTGGGCTTGAATC
CAGGGGGGACTGAATCCTCAGCTTACGGACCTGGGCCCATCTGTTTCTGGAGGGCTCCAGTC
TTCCTTGTCCTGTCTTGGAGTCCCCAAGAAGGAATCACAGGGGAGGAACCAGATACCAGCCA
TGACCCCAGGCTCCACCAAGCATCTTCATGTCCCCCTGCTCATCCCCCACTCCCCCCCACCC
AGAGTTGCTCATCCTGCCAGGGCTGGCTGTGCCCACCCCAAGGCTGCCCTCCTGGGGGCCCC
AGAACTGCCTGATCGTGCCGTGGCCCAGTTTTGTGGCATCTGCAGCAACACAAGAGAGAGGA
CAATGTCCTCCTCTTGACCCGCTGTCACCTAACCAGACTCGGGCCCTGCACCTCTCAGGCAC
TTCTGGAAAATGACTGAGGCAGATTCTTCCTGAAGCCCATTCTCCATGGGGCAACAAGGACA
CCTATTCTGTCCTTGTCCTTCCATCGCTGCCCCAGAAAGCCTCACATATCTCCGTTTAGAAT
CAGGTCCCTTCTCCCCAGATGAAGAGGAGGGTCTCTGCTTTGTTTTCTCTATCTCCTCCTCA
GACTTGACCAGGCCCAGCAGGCCCCAGAAGACCATTACCCTATATCCCTTCTCCTCCCTAGT
CACATGGCCATAGGCCTGCTGATGGCTCAGGAAGGCCATTGCAAGGACTCCTCAGCTATGGG
AGAGGAAGCACATCACCCATTGACCCCCGCAACCCCTCCCTTTCCTCCTCTGAGTCCCGACT
GGGGCCACATGCAGCCTGACTTCTTTGTGCCTGTTGCTGTCCCTGCAGTCTTCAGAGGGCCA
CCGCAGCTCCAGTGCCACGGCAGGAGGCTGTTCCTGAATAGCCCCTGTGGTAAGGGCCAGGA
GAGTCCTTCCATCCTCCAAGGCCCTGCTAAAGGACACAGCAGCCAGGAAGTCCCCTGGGCCC
CTAGCTGAAGGACAGCCTGCTCCCTCCGTCTCTACCAGGAATGGCCTTGTCCTATGGAAGGC
ACTGCCCCATCCCAAACTAATCTAGGAATCACTGTCTAACCACTCACTGTCATGAATGTGTA
CTTAAAGGATGAGGTTGAGTCATACCAAATAGTGATTTCGATAGTTCAAAATGGTGAAATTA
GCAATTCTACATGATTCAGTCTAATCAATGGATACCGACTGTTTCCCACACAAGTCTCCTGT
TCTCTTAAGCTTACTCACTGACAGCCTTTCACTCTCCACAAATACATTAAAGATATGGCCAT
CACCAAGCCCCCTAGGATGACACCAGACCTGAGAGTCTGAAGACCTGGATCCAAGTTCTGAC
TTTTCCCCCTGACAGCTGTGTGACCTTCGTGAAGTCGCCAAACCTCTCTGAGCCCCAGTCAT
TGCTAGTAAGACCTGCCTTTGAGTTGGTATGATGTTCAAGTTAGATAACAAAATGTTTATAC
CCATTAGAACAGAGAATAAATAGAACTACATTTCTTGCACTTATGAGCTTTCTGTGAATCAG
ACATCCCTATGAAGTACCTCCCCTGGCTGTTTCTCATTTACTCACTGTAGCAGCACTGCGAT
GTGTGAGTATATCTGCTGTGCTCTTAAACTCCAAATCTGAGGAAACTGAGGCTCAGAGAGGC
TACTGGTCTCCCACAATGTCACACAGCTCATAAGTGGCAAAGCTGGCTTGATGGGCTACTTG
TTCCTCTGAACCATACCACCTCACCACACTCTCCCCTTCGAGGGTCACGCTAAACTTCTGCA
GAGGTAATTCCTCCTTAAACCAGAAGGGTTGCTGGTGGCCCACAGCTCACGCCTAGCACACT
TCATGAGAAAAACACCCTGTGCCCAGTGTGGAGCAGGCATTGAGCTGAAGGTGGTGAGCAGA
AGCTCATCCACCAGATGTTGACACAGCCCGCAGCCTTGGGCGACCCACAGGACTCCTCTTAT
TTAACTGGCATTTGGTAGGAGAACAGGGGCAGAGTCAAAGACAAGTTGGCTTTCTGGAGAGC
CCAGGGCAGGGAAGGAGGTGGCAGCGCTGAGGGCGGTCACCTTAGACACCATCGTTTTACTT
TGAAGAATTGTCTGTCACA.
>Exemplary Serpin1A polynucleotide sequence corresponding to NM_000295. In
embodiments, the nucleobase shown by bold underlined text corresponds to a
nucleobase targeted for base editing according to the methods provided herein.
In some embodiments, a PAM sequence corresponding to a guide polynucleotide used
to edit the target base is shown as bold double-underlined text
      1 acaatgactc ctttcggtaa gtgcagtgga agctgtacac tgcccaggca aagcgtccgg
    61 gcagcgtagg cgggcgactc agatcccagc cagtggactt agcccctgtt tgctcctccg
  121 ataactgggg tgaccttggt taatattcac cagcagcctc ccccgttgcc cctctggatc
  181 cactgcttaa atacggacga ggacagggcc ctgtctcctc agcttcaggc accaccactg
  241 acctgggaca gtgaatcgac aatgccgtct tctgtctcgt ggggcatcct cctgctggca
  301 ggcctgtgct gcctggtccc tgtctccctg gctgaggatc cccagggaga tgctgcccag
  361 aagacagata catcccacca tgatcaggat cacccaacct tcaacaagat cacccccaac
  421 ctggctgagt tcgccttcag cctataccgc cagctggcac accagtccaa cagcaccaat
  481 atcttcttct ccccagtgag catcgctaca gcctttgcaa tgctctccct ggggaccaag
  541 gctgacactc acgatgaaat cctggagggc ctgaatttca acctcacgga gattccggag
  601 gctcagatcc atgaaggctt ccaggaactc ctccgtaccc tcaaccagcc agacagccag
  661 ctccagctga ccaccggcaa tggcctgttc ctcagcgagg gcctgaagct agtggataag
  721 tttttggagg atgttaaaaa gttgtaccac tcagaagcct tcactgtcaa cttcggggac
  781 accgaagagg ccaagaaaca gatcaacgat tacgtggaga agggtactca agggaaaatt
  841 gtggatttgg tcaaggagct tgacagagac acagtttttg ctctggtgaa ttacatcttc
  901 tttaaaggca aatgggagag accctttgaa gtcaaggaca ccgaggaaga ggacttccac
  961 gtggaccagg tgaccaccgt gaaggtgcct atgatgaagc gtttaggcat gtttaacatc
1021 cagcactgta agaagctgtc cagctgggtg ctgctgatga aatacctggg aatgccacc
1081 gccatcttct tcctgcctga tgaggggaaa ctacagcacc tggaaaatga ctcacccac
1141 gatatcatca ccaagttcct ggaaaatgaa gacagaaggt ctgccagctt catttaccc
1201 aaactgtcca ttactggaac ctatgatctg aagagcgtcc tgggtcaact ggcatcact
1261 aaggtcttca gcaatggggc tgacctctcc ggggtcacag aggaggcacc ctgaagctc
1321 tccaaggccg tgcataaggc tgtgctgacc atcgacgaga aagggactga gctgctggg
1381 gccatgtttt tagaggccat acccatgtct atcccccccg aggtcaagtt aacaaaccc
1441 tttgtcttct taatgattga acaaaatacc aagtctcccc tcttcatggg aaagtggtg
1501 aatcccaccc aaaaataact gcctctcgct cctcaacccc tcccctccat cctggcccc
1561 ctccctggat gacattaaag aagggttgag ctggtccctg cctgcatgtg ctgtaaatc
1621 cctcccatgt tttctctgag tctccctttg cctgctgagg ctgtatgtgg ctccaggta
1681 acagtgctgt cttcgggccc cctgaactgt gttcatggag catctggctg gtaggcaca
1741 tgctgggctt gaatccaggg gggactgaat cctcagctta cggacctggg ccatctgtt
1801 tctggagggc tccagtcttc cttgtcctgt cttggagtcc ccaagaagga tcacagggg
1861 aggaaccaga taccagccat gaccccaggc tccaccaagc atcttcatgt cccctgctc
1921 atcccccact cccccccacc cagagttgct catcctgcca gggctggctg gcccacccc
1981 aaggctgccc tcctgggggc cccagaactg cctgatcgtg ccgtggccca ttttgtggc
2041 atctgcagca acacaagaga gaggacaatg tcctcctctt gacccgctgt acctaacca
2101 gactcgggcc ctgcacctct caggcacttc tggaaaatga ctgaggcaga tcttcctga
2161 agcccattct ccatggggca acaaggacac ctattctgtc cttgtccttc atcgctgcc
2221 ccagaaagcc tcacatatct ccgtttagaa tcaggtccct tctccccaga gaagaggag
2281 ggtctctgct ttgttttctc tatctcctcc tcagacttga ccaggcccag aggccccag
2341 aagaccatta ccctatatcc cttctcctcc ctagtcacat ggccataggc tgctgatgg
2401 ctcaggaagg ccattgcaag gactcctcag ctatgggaga ggaagcacat acccattga
2461 cccccgcaac ccctcccttt cctcctctga gtcccgactg gggccacatg agcctgact
2521 tctttgtgcc tgttgctgtc cctgcagtct tcagagggcc accgcagctc agtgccacg
2581 gcaggaggct gttcctgaat agcccctgtg gtaagggcca ggagagtcct ccatcctcc
2641 aaggccctgc taaaggacac agcagccagg aagtcccctg ggcccctagc gaaggacag
2701 cctgctccct ccgtctctac caggaatggc cttgtcctat ggaaggcact ccccatccc
2761 aaactaatct aggaatcact gtctaaccac tcactgtcat gaatgtgtac taaaggatg
2821 aggttgagtc ataccaaata gtgatttcga tagttcaaaa tggtgaaatt gcaattcta
2881 catgattcag tctaatcaat ggataccgac tgtttcccac acaagtctcc gttctctta
2941 agcttactca ctgacagcct ttcactctcc acaaatacat taaagatatg ccatcacca
3001 agccccctag gatgacacca gacctgagag tctgaagacc tggatccaag tctgacttt
3061 tccccctgac agctgtgtga ccttcgtgaa gtcgccaaac ctctctgagc ccagtcatt
3121 gctagtaaga cctgcctttg agttggtatg atgttcaagt tagataacaa atgtttata
3181 cccattagaa cagagaataa atagaactac atttcttgca (SEQ ID NO: 592)
```

[0079] By “alteration” is meant a change in the level, structure, or activity of an analyte, gene or polypeptide as detected by standard art known methods such as those described herein. As used herein, an alteration includes a change (e.g., increase or reduce) in expression levels. In embodiments, the increase or reduction in expression levels is by 10%, 25%, 40%, 50% or greater. In some embodiments, an alteration includes an insertion, deletion, or substitution of a nucleobase or amino acid (by, e.g., genetic engineering).

[0080] By “ameliorate” is meant reduce, suppress, attenuate, diminish, arrest, or stabilize the development or progression of a disease.

[0081] By “analog” is meant a molecule that is not identical but has analogous functional or structural features. For example, a polypeptide analog retains the biological activity of a corresponding naturally-occurring polypeptide, while having certain biochemical modifications that enhance the analog's function relative to a naturally occurring polypeptide.

[0082] Such biochemical modifications could increase the analog's protease resistance, membrane permeability, or half-life, without altering, for example, ligand binding. An analog may include an unnatural amino acid.

[0083] By “base editor (BE),” or “nucleobase editor polypeptide (NBE)” is meant an agent that binds a polynucleotide and has nucleobase modifying activity. In various embodiments, the base editor comprises a nucleobase modifying polypeptide (e.g., a deaminase) and a polynucleotide programmable nucleotide binding domain (e.g., Cas9 or Cpf1). Representative nucleic acid and protein sequences of base editors include those sequences having about or at least about 85% sequence identity to any base editor sequence provided in the sequence listing, such as those corresponding to SEQ ID NOs: 2-11.

[0084] By “base editing activity” is meant acting to chemically alter a base within a polynucleotide. In one embodiment, a first base is converted to a second base. In another embodiment, the base editing activity is adenosine or adenine deaminase activity, e.g., converting A•T to G•C.

[0085] The term “base editor system” refers to an intermolecular complex for editing a nucleobase of a target nucleotide sequence. In various embodiments, the base editor (BE) system comprises (1) a polynucleotide programmable nucleotide binding domain, a deaminase domain (e.g., adenosine deaminase) for deaminating nucleobases in the target nucleotide sequence; and (2) one or more guide polynucleotides (e.g., guide RNA) in conjunction with the polynucleotide programmable nucleotide binding domain. In various embodiments, the base editor (BE) system comprises a nucleobase editor domain selected from an adenosine deaminase or a cytidine deaminase, and a domain having nucleic acid sequence specific binding activity. In some embodiments, the base editor system comprises (1) a base editor (BE) comprising a polynucleotide programmable DNA binding domain and a deaminase domain for deaminating one or more nucleobases in a target nucleotide sequence; and (2) one or more guide RNAs in conjunction with the polynucleotide programmable DNA binding domain. In some embodiments, the polynucleotide programmable nucleotide binding domain is a polynucleotide programmable DNA binding domain. In some embodiments, the base editor is an adenine or adenosine base editor (ABE). In some embodiments, the base editor is an adenine or adenosine base editor (ABE). In some embodiments, the base editor system (e.g., a base editor system comprising a cytidine deaminase) comprises a uracil glycosylase inhibitor or other agent or peptide (e.g., a uracil stabilizing protein such as provided in WO2022015969, the disclosure of which is incorporated herein by reference in its entirety for all purposes) that inhibits the inosine base excision repair system.

[0086] The term “Cas9” or “Cas9 domain” refers to an RNA guided nuclease comprising a Cas9 protein, or a fragment thereof (e.g., a protein comprising an active, inactive, or partially active DNA cleavage domain of Cas9, and/or the gRNA binding domain of Cas9). A Cas9 nuclease is also referred to sometimes as a casnl nuclease or a CRISPR (clustered regularly interspaced short palindromic repeat) associated nuclease.

[0087] The term “conservative amino acid substitution” or “conservative mutation” refers to the replacement of one amino acid by another amino acid with a common property. A functional way to define common properties between individual amino acids is to analyze the normalized frequencies of amino acid changes between corresponding proteins of homologous organisms (Schulz, G. E. and Schirmer, R. H., Principles of Protein Structure, Springer-Verlag, New York (1979)). According to such analyses, groups of amino acids can be defined where amino acids within a group exchange preferentially with each other, and therefore resemble each other most in their impact on the overall protein structure (Schulz, G. E. and Schirmer, R. H., supra). Non-limiting examples of conservative mutations include amino acid substitutions of amino acids, for example, lysine for arginine and vice versa such that a positive charge can be maintained; glutamic acid for aspartic acid and vice versa such that a negative charge can be maintained; serine for threonine such that a free —OH can be maintained; and glutamine for asparagine such that a free —NH₂ can be maintained.

[0088] Amino acids generally can be grouped into classes according to the following common side-chain properties:
[0089] (1) hydrophobic: Norleucine, Met, Ala, Val, Leu, He;
[0090] (2) neutral hydrophilic: Cys, Ser, Thr, Asn, Gin;
[0091] (3) acidic: Asp, Glu;
[0092] (4) basic: His, Lys, Arg;
[0093] (5) residues that influence chain orientation: Gly, Pro;
[0094] (6) aromatic: Trp, Tyr, Phe.

[0095] In some embodiments, conservative substitutions can involve the exchange of a member of one of these classes for another member of the same class. In some embodiments, non-conservative amino acid substitutions can involve exchanging a member of one of these classes for another class.

[0096] The term “coding sequence” or “protein coding sequence” as used interchangeably herein refers to a segment of a polynucleotide that codes for a protein. Coding sequences can also be referred to as open reading frames. The region or sequence is bounded nearer the 5′ end by a start codon and nearer the 3′ end with a stop codon. Stop codons useful with the base editors described herein include the following: TAG, TAA, and TGA.

[0097] By “complex” is meant a combination of two or more molecules whose interaction relies on inter-molecular forces. Non-limiting examples of inter-molecular forces include covalent and non-covalent interactions. Non-limiting examples of non-covalent interactions include hydrogen bonding, ionic bonding, halogen bonding, hydrophobic bonding, van der Waals interactions (e.g., dipole-dipole interactions, dipole-induced dipole interactions, and London dispersion forces), and π-effects. In an embodiment, a complex comprises polypeptides, polynucleotides, or a combination of one or more polypeptides and one or more polynucleotides. In one embodiment, a complex comprises one or more polypeptides that associate to form a base editor (e.g., base editor comprising a nucleic acid programmable DNA binding protein, such as Cas9, and a deaminase) and a polynucleotide (e.g., a guide RNA). In an embodiment, the complex is held together by hydrogen bonds. It should be appreciated that one or more components of a base editor (e.g., a deaminase, or a nucleic acid programmable DNA binding protein) may associate covalently or non-covalently. As one example, a base editor may include a deaminase covalently linked to a nucleic acid programmable DNA binding protein (e.g., by a peptide bond). Alternatively, a base editor may include a deaminase and a nucleic acid programmable DNA binding protein that associate noncovalently (e.g., where one or more components of the base editor are supplied in trans and associate directly or via another molecule such as a protein or nucleic acid). In an embodiment, one or more components of the complex are held together by hydrogen bonds.

[0098] The term “deaminase” or “deaminase domain,” as used herein, refers to a protein or fragment thereof that catalyzes a deamination reaction.

[0099] “Detect” refers to identifying the presence, absence or amount of the analyte to be detected. In one embodiment, a sequence alteration in a polynucleotide or polypeptide is detected. In another embodiment, the presence of indels is detected.

[0100] By “detectable label” is meant a composition that when linked to a molecule of interest renders the latter detectable, via spectroscopic, photochemical, biochemical, immunochemical, or chemical means. For example, useful labels include radioactive isotopes, magnetic beads, metallic beads, colloidal particles, fluorescent dyes, electron-dense reagents, enzymes (for example, as commonly used in an enzyme linked immunosorbent assay (ELISA)), biotin, digoxigenin, or haptens.

[0101] By “disease” is meant any condition or disorder that damages or interferes with the normal function of a cell, tissue, or organ. Exemplary diseases include Alpha-1 antitrypsin deficiency, chronic obstructive pulmonary disease (COPD), liver disease, skin problems (e.g., panniculitis), and inflammation of the blood vessels (e.g., vasculitis). In some embodiments such diseases are amenable to treatment with base editors, for example, correcting a mutation in a gene encoding an A1AT protein.

[0102] The term “effective amount,” as used herein, refers to an amount of a biologically active agent that is sufficient to elicit a desired biological response. In particular embodiments, an effective amount is the amount of a base editor system (e.g., a fusion protein comprising a programable DNA binding protein, a nucleobase editor and gRNA) that is sufficient to alter a A1AT mutation in a cell to achieve a therapeutic effect. Such therapeutic effect need not be sufficient to alter a A1AD in all cells of a tissue or organ, but only in about 1%, 5%, 10%, 25%, 50%, 75% or more of the cells present in a subject, tissue, cell, or organ. In one embodiment, an effective amount is sufficient to ameliorate one or more symptoms of A1AD. The effective amount of an active agent(s) used to practice the present invention for therapeutic treatment of a disease varies depending upon the manner of administration, the age, body weight, and general health of the subject. Ultimately, the attending physician or veterinarian will decide the appropriate amount and dosage regimen. Such amount is referred to as an “effective” amount. In one embodiment, an effective amount is the amount of a base editor of the invention (e.g., a fusion protein comprising a programable DNA binding protein, a nucleobase editor and gRNA) sufficient to introduce an alteration in a gene of interest in a cell (e.g., a cell in vitro or in vivo). In one embodiment, an effective amount is the amount of a base editor required to achieve a therapeutic effect (e.g., to reduce or control a disease or a symptom or condition thereof). By “fragment” is meant a portion of a polypeptide or nucleic acid molecule. This portion contains, at least about 10%, 20%, 30%, 40%, 50%, 60%, 70%, 80%, or 90% of the entire length of the reference nucleic acid molecule or polypeptide. A fragment may contain 10, 20, 30, 40, 50, 60, 70, 80, 90, or 100, 200, 300, 400, 500, 600, 700, 800, 900, or 1000 nucleotides or amino acids. In some embodiments, the fragment is a functional fragment.

[0103] By “guide polynucleotide” is meant a polynucleotide or polynucleotide complex which is specific for a target sequence and can form a complex with a polynucleotide programmable nucleotide binding domain protein (e.g., Cas9 or Cpf1). In an embodiment, the guide polynucleotide is a guide RNA (gRNA). gRNAs can exist as a complex of two or more RNAs, or as a single RNA molecule.

[0104] By “heterologous,” or “exogenous” is meant a polynucleotide or polypeptide that 1) has been experimentally incorporated into a polynucleotide or polypeptide sequence to which the polynucleotide or polypeptide is not normally found in nature; and/or 2) has been experimentally placed into a cell that does not normally comprise the polynucleotide or polypeptide. In some embodiments, “heterologous” means that a polynucleotide or polypeptide has been experimentally placed into a non-native context. In some embodiments, a heterologous polynucleotide or polypeptide is derived from a first species or host organism and is incorporated into a polynucleotide or polypeptide derived from a second species or host organism. In some embodiments, the first species or host organism is different from the second species or host organism. In some embodiments the heterologous polynucleotide is DNA. In some embodiments the heterologous polynucleotide is RNA.

[0105] “Hybridization” means hydrogen bonding, which may be Watson-Crick, Hoogsteen or reversed Hoogsteen hydrogen bonding, between complementary nucleobases. For example, adenine and thymine are complementary nucleobases that pair through the formation of hydrogen bonds.

[0106] By “increases” is meant a positive alteration of at least 10%, 25%, 50%, 75%, or 100%, or about 1.5 fold, about 2 fold, about 3-fold, about 4-fold, about 5-fold, about 6-fold, about 7-fold, about 8-fold, about 9-fold, about 10-fold, about 15-fold, about 20-fold, about 25-fold, about 30-fold, about 35-fold, about 40-fold, about 45-fold, about 50-fold, or about 100-fold.

[0107] An “intein” is a fragment of a protein that is able to excise itself and join the remaining fragments (the exteins) with a peptide bond in a process known as protein splicing.

[0108] The terms “isolated,” “purified,” or “biologically pure” refer to material that is free to varying degrees from components which normally accompany it as found in its native state. “Isolate” denotes a degree of separation from original source or surroundings. “Purify” denotes a degree of separation that is higher than isolation. A “purified” or “biologically pure” protein is sufficiently free of other materials such that any impurities do not materially affect the biological properties of the protein or cause other adverse consequences. That is, a nucleic acid or peptide of this disclosure is purified if it is substantially free of cellular material, viral material, or culture medium when produced by recombinant DNA techniques, or chemical precursors or other chemicals when chemically synthesized. Purity and homogeneity are typically determined using analytical chemistry techniques, for example, polyacrylamide gel electrophoresis or high performance liquid chromatography. The term “purified” can denote that a nucleic acid or protein gives rise to essentially one band in an electrophoretic gel. For a protein that can be subjected to modifications, for example, phosphorylation or glycosylation, different modifications may give rise to different isolated proteins, which can be separately purified.

[0109] By “isolated polynucleotide” is meant a nucleic acid molecule that is free of the genes which, in the naturally-occurring genome of the organism from which the nucleic acid molecule of the disclosure is derived, flank the gene. The term therefore includes, for example, a recombinant DNA that is incorporated into a vector; into an autonomously replicating plasmid or virus; or into the genomic DNA of a prokaryote or eukaryote; or that exists as a separate molecule (for example, a cDNA or a genomic or cDNA fragment produced by PCR or restriction endonuclease digestion) independent of other sequences. In addition, the term includes an RNA molecule that is transcribed from a DNA molecule, as well as a recombinant DNA that is part of a hybrid gene encoding additional polypeptide sequence.

[0110] By an “isolated polypeptide” is meant a polypeptide of the disclosure that has been separated from components that naturally accompany it. Typically, the polypeptide is isolated when it is at least 60%, by weight, free from the proteins and naturally-occurring organic molecules with which it is naturally associated. In embodiments, the preparation is at least 75%, at least 90%, or at least 99%, by weight, a polypeptide of the disclosure. An isolated polypeptide of the disclosure may be obtained, for example, by extraction from a natural source, by expression of a recombinant nucleic acid encoding such a polypeptide; or by chemically synthesizing the protein. Purity can be measured by any appropriate method, for example, column chromatography, polyacrylamide gel electrophoresis, or by HPLC analysis.

[0111] The term “linker”, as used herein, refers to a molecule that links two moieties. In one embodiment, the term “linker” refers to a covalent linker (e.g., covalent bond) or a non-covalent linker. In some embodiments the linker comprises one or more amino acids that are covalently linked.

[0112] By “marker” is meant any protein or polynucleotide having an alteration in expression, level, structure, or activity that is associated with a disease or disorder, such as alpha-1 antitrypsin deficiency (A1AD).

[0113] The term “mutation,” as used herein, refers to a substitution of a residue within a sequence, e.g., a nucleic acid or amino acid sequence, with another residue, or a deletion or insertion of one or more residues within a sequence. Mutations are typically described herein by identifying the original residue followed by the position of the residue within the sequence and by the identity of the newly substituted residue. Various methods for making the amino acid substitutions (mutations) provided herein are well known in the art, and are provided by, for example, Green and Sambrook, Molecular Cloning: A Laboratory Manual (4^{th} ed., Cold Spring Harbor Laboratory Press, Cold Spring Harbor, N.Y. (2012)).

[0114] The terms “nucleic acid” and “nucleic acid molecule,” as used herein, refer to a compound comprising a nucleobase and an acidic moiety, e.g., a nucleoside, a nucleotide, or a polymer of nucleotides. Typically, polymeric nucleic acids, e.g., nucleic acid molecules comprising three or more nucleotides are linear molecules, in which adjacent nucleotides are linked to each other via a phosphodiester linkage. In some embodiments, “nucleic acid” refers to individual nucleic acid residues (e.g., nucleotides and/or nucleosides). In some embodiments, “nucleic acid” refers to an oligonucleotide chain comprising three or more individual nucleotide residues. As used herein, the terms “oligonucleotide” and “polynucleotide” can be used interchangeably to refer to a polymer of nucleotides (e.g., a string of at least three nucleotides). In some embodiments, “nucleic acid” encompasses RNA as well as single and/or double-stranded DNA. Nucleic acids may be naturally occurring, for example, in the context of a genome, a transcript, an mRNA, tRNA, rRNA, siRNA, snRNA, a plasmid, cosmid, chromosome, chromatid, or other naturally occurring nucleic acid molecule. On the other hand, a nucleic acid molecule may be a non-naturally occurring molecule, e.g., a recombinant DNA or RNA, an artificial chromosome, an engineered genome, or fragment thereof, or a synthetic DNA, RNA, DNA/RNA hybrid, or including non-naturally occurring nucleotides or nucleosides. Furthermore, the terms “nucleic acid,” “DNA,” “RNA,” and/or similar terms include nucleic acid analogs, e.g., analogs having other than a phosphodiester backbone. Nucleic acids can be purified from natural sources, produced using recombinant expression systems and optionally purified, chemically synthesized, etc. Where appropriate, e.g., in the case of chemically synthesized molecules, nucleic acids comprise nucleoside analogs such as analogs having chemically modified bases or sugars, and backbone modifications. A nucleic acid sequence is presented in the 5′ to 3′ direction unless otherwise indicated. In some embodiments, a nucleic acid is or comprises natural nucleosides (e.g. adenosine, thymidine, guanosine, cytidine, uridine, deoxyadenosine, deoxythymidine, deoxyguanosine, and deoxycytidine); nucleoside analogs (e.g., 2-aminoadenosine, 2-thiothymidine, inosine, pyrrolo-pyrimidine, 3-methyl adenosine, 5-methylcytidine, 2-aminoadenosine, C5-bromouridine, C5-fluorouridine, C5-iodouridine, C5-propynyl-uridine, C5-propynyl-cytidine, C5-methylcytidine, 2-aminoadenosine, 7-deazaadenosine, 7-deazaguanosine, 8-oxoadenosine, 8-oxoguanosine, 0(6)-methylguanine, and 2-thiocytidine); chemically modified bases; biologically modified bases (e.g., methylated bases); intercalated bases; modified sugars (e.g., 2′-fluororibose, ribose, 2′-deoxyribose, arabinose, and hexose); and/or modified phosphate groups (e.g., phosphorothioates and 5′-N-phosphoramidite linkages).

[0115] The term “nuclear localization sequence,” “nuclear localization signal,” or “NLS” refers to an amino acid sequence that promotes import of a protein into the cell nucleus. Nuclear localization sequences are known in the art and described, for example, in Plank et al., International PCT application, PCT/EP2000/011690, filed Nov. 23, 2000, published as WO/2001/038547 on May 31, 2001, the contents of which are incorporated herein by reference for their disclosure of exemplary nuclear localization sequences. In other embodiments, the NLS is an optimized NLS described, for example, by Koblan et al., Nature Biotech. 2018 doi:10.1038/nbt.4172. In some embodiments, an NLS comprises the amino acid sequence KRTADGSEFESPKKKRKV (SEQ ID NO: 190), KRPAATKKAGQAKKKK (SEQ ID NO: 191), KKTELQTTNAENKTKKL (SEQ ID NO: 192), KRGINDRNFWRGENGRKTR (SEQ ID NO: 193), RKSGKIAAIVVKRPRK (SEQ ID NO: 194), PKKKRKV (SEQ ID NO: 195), MDSLLMNRRKFLYQFKNVRWAKGRRETYLC (SEQ ID NO: 196), PKKKRKVEGADKRTADGSE FESPKKKRKV (SEQ ID NO: 328), or RKSGKIAAIVVKRPRKPKKKRKV (SEQ ID NO: 329).

[0116] The term “nucleobase,” “nitrogenous base,” or “base,” used interchangeably herein, refers to a nitrogen-containing biological compound that forms a nucleoside, which in turn is a component of a nucleotide. The ability of nucleobases to form base pairs and to stack one upon another leads directly to long-chain helical structures such as ribonucleic acid (RNA) and deoxyribonucleic acid (DNA). Five nucleobases—adenine (A), cytosine (C), guanine (G), thymine (T), and uracil (U)—are called primary or canonical. Adenine and guanine are derived from purine, and cytosine, uracil, and thymine are derived from pyrimidine. DNA and RNA can also contain other (non-primary) bases that are modified. Non-limiting exemplary modified nucleobases can include hypoxanthine, xanthine, 7-methylguanine, 5,6-dihydrouracil, 5-methylcytosine (m5C), and 5-hydromethylcytosine. Hypoxanthine and xanthine can be created through mutagen presence, both of them through deamination (replacement of the amine group with a carbonyl group). Hypoxanthine can be modified from adenine. Xanthine can be modified from guanine. Uracil can result from deamination of cytosine. A “nucleoside” consists of a nucleobase and a five carbon sugar (either ribose or deoxyribose). Examples of a nucleoside include adenosine, guanosine, uridine, cytidine, 5-methyluridine (m5U), deoxyadenosine, deoxyguanosine, thymidine, deoxyuridine, and deoxycytidine. Examples of a nucleoside with a modified nucleobase includes inosine (I), xanthosine (X), 7-methylguanosine (m7G), dihydrouridine (D), 5-methylcytidine (m5C), and pseudouridine (Ψ). A “nucleotide” consists of a nucleobase, a five carbon sugar (either ribose or deoxyribose), and at least one phosphate group. Non-limiting examples of modified nucleobases and/or chemical modifications that a modified nucleobase may include are the following: pseudo-uridine, 5-Methyl-cytosine, 2′-O-methyl-3′-phosphonoacetate, 2′-O-methyl thioPACE (MSP), 2′-O-methyl-PACE (MP), 2′-fluoro RNA (2′-F-RNA), constrained ethyl (S-cEt), 2′-O-methyl (‘M’), 2′-O-methyl-3′-phosphorothioate (‘MS’), 2′-O-methyl-3′-thiophosphonoacetate (‘MSP’), 5-methoxyuridine, phosphorothioate, and N1-Methylpseudouridine.

[0117] The term “nucleic acid programmable DNA binding protein” or “napDNAbp” may be used interchangeably with “polynucleotide programmable nucleotide binding domain” to refer to a protein that associates with a nucleic acid (e.g., DNA or RNA), such as a guide nucleic acid or guide polynucleotide (e.g., gRNA), that guides the napDNAbp to a specific nucleic acid sequence. In some embodiments, the polynucleotide programmable nucleotide binding domain is a polynucleotide programmable DNA binding domain. In some embodiments, the polynucleotide programmable nucleotide binding domain is a polynucleotide programmable RNA binding domain. In some embodiments, the polynucleotide programmable nucleotide binding domain is a Cas9 protein. A Cas9 protein can associate with a guide RNA that guides the Cas9 protein to a specific DNA sequence that is complementary to the guide RNA. In some embodiments, the napDNAbp is a Cas9 domain, for example a nuclease active Cas9, a Cas9 nickase (nCas9), or a nuclease inactive Cas9 (dCas9). Non-limiting examples of nucleic acid programmable DNA binding proteins include, Cas9 (e.g., dCas9 and nCas9), Cas12a/Cpf1, Cas12b/C2c1, Cas12c/C2c3, Cas12d/CasY, Cas12e/CasX, Cas12g, Cas12h, Cas12i, and Cas12j/CasΦ (Cas12j/Casphi). Non-limiting examples of Cas enzymes include Cas1, Cas1B, Cas2, Cas3, Cas4, Cas5, Cas5d, Cas5t, Cas5h, Cas5a, Cas6, Cas7, Cas8, Cas8a, Cas8b, Cas8c, Cas9 (also known as Csn1 or Csx12), Cas10, Cas10d, Cas12a/Cpf1, Cas12b/C2c1, Cas12c/C2c3, Cas12d/CasY, Cas12e/CasX, Cas12g, Cas12h, Cas12i, Cas12j/CasΦ, Cpf1, Csy1, Csy2, Csy3, Csy4, Cse1, Cse2, Cse3, Cse4, Cse5e, Csc1, Csc2, Csa5, Csn1, Csn2, Csm1, Csm2, Csm3, Csm4, Csm5, Csm6, Cmr1, Cmr3, Cmr4, Cmr5, Cmr6, Csb1, Csb2, Csb3, Csx17, Csx14, Csx10, Csx16, CsaX, Csx3, Csx1, Csx1S, Csx11, Csf1, Csf2, CsO, Csf4, Csd1, Csd2, Cst1, Cst2, Csh1, Csh2, Csa1, Csa2, Csa3, Csa4, Csa5, Type II Cas effector proteins, Type V Cas effector proteins, Type VI Cas effector proteins, CARF, DinG, homologues thereof, or modified or engineered versions thereof. Other nucleic acid programmable DNA binding proteins are also within the scope of this disclosure, although they may not be specifically listed in this disclosure. See, e.g., Makarova et al. “Classification and Nomenclature of CRISPR-Cas Systems: Where from Here?” CRISPR J. 2018 October; 1:325-336. doi: 10.1089/crispr.2018.0033; Yan et al., “Functionally diverse type V CRISPR-Cas systems” Science. 2019 Jan. 4; 363(6422):88-91. doi: 10.1126/science.aav7271, the entire contents of each are hereby incorporated by reference. Exemplary nucleic acid programmable DNA binding proteins and nucleic acid sequences encoding nucleic acid programmable DNA binding proteins are provided in the Sequence Listing as SEQ ID NOs: 197-231, 232-245, 254-257, 260, and 378. In some embodiments, the napDNAbp is a (CRISPR-associated system) Cas9 endonuclease, for example, Cas9 (Csn1) from Streptococcus pyogenes (e.g., SEQ ID NO: 197), Cas9 from Neisseria meningitidis (NmeCas9; SEQ ID NO: 208), Nme2Cas9 (SEQ ID NO: 209), Streptococcus constellatus (ScoCas9), or derivatives thereof (e.g., a sequence with at least about 85% sequence identity to a Cas9, such as Nme2Cas9 or spCas9). Further non-limiting examples of nucleic acid programmable DNA binding proteins include those disclosed or referenced in Rufflow, et al., “Design of highly functional genome editors by modeling of the universe of CRISPR-Cas Sequences,” bioRxiv, posted Apr. 22, 2024, doi: 10.1101/2024.04.22.590591, the disclosure of which is incorporated herein by reference in its entirety for all purposes, which were designed using artificial intelligence. In some embodiments, the napDNAbp is OpenCRISPR-1, or a variant thereof (e.g., a variant comprising a D10A amino acid alteration and/or lacking an N-terminal methionine).

[0118] The terms “nucleobase editing domain” or “nucleobase editing protein,” as used herein, refers to a protein or enzyme that can catalyze a nucleobase modification in RNA or DNA, such as cytosine (or cytidine) to uracil (or uridine) or thymine (or thymidine), and adenine (or adenosine) to hypoxanthine (or inosine) deaminations, as well as non-templated nucleotide additions and insertions. In some embodiments, the nucleobase editing domain is a deaminase domain (e.g., an adenine deaminase or an adenosine deaminase).

[0119] As used herein, “obtaining” as in “obtaining an agent” includes synthesizing, purchasing, or otherwise acquiring the agent.

[0120] By “subject” or “patient” is meant a mammal, including, but not limited to, a human or non-human mammal. In embodiments, the mammal is a bovine, equine, canine, ovine, rabbit, rodent, nonhuman primate, or feline. In an embodiment, “patient” refers to a mammalian subject with a higher than average likelihood of developing a disease or a disorder. Exemplary patients can be humans, non-human primates, cats, dogs, pigs, cattle, cats, horses, camels, llamas, goats, sheep, rodents (e.g., mice, rabbits, rats, or guinea pigs) and other mammalians that can benefit from the therapies disclosed herein. Exemplary human patients can be male and/or female.

[0121] “Patient in need thereof” or “subject in need thereof” is referred to herein as a patient diagnosed with, at risk or having, predetermined to have, or suspected of having a disease or disorder.

[0122] The terms “pathogenic mutation”, “pathogenic variant”, “disease causing mutation”, “disease causing variant”, “deleterious mutation”, or “predisposing mutation” refers to a genetic alteration or mutation that is associated with a disease or disorder or that increases an individual's susceptibility or predisposition to a certain disease or disorder. In some embodiments, the pathogenic mutation comprises at least one wild-type amino acid substituted by at least one pathogenic amino acid in a protein encoded by a gene. In some embodiments, the pathogenic mutation is in a terminating region (e.g., stop codon). In some embodiments, the pathogenic mutation is in a non-coding region (e.g., intron, promoter, etc.).

[0123] The terms “protein”, “peptide”, “polypeptide”, and their grammatical equivalents are used interchangeably herein, and refer to a polymer of amino acid residues linked together by peptide (amide) bonds. A protein, peptide, or polypeptide can be naturally occurring, recombinant, or synthetic, or any combination thereof.

[0124] The term “fusion protein” as used herein refers to a hybrid polypeptide which comprises protein domains from at least two different proteins.

[0125] The term “recombinant” as used herein in the context of proteins or nucleic acids refers to proteins or nucleic acids that do not occur in nature but are the product of human engineering. For example, in some embodiments, a recombinant protein or nucleic acid molecule comprises an amino acid or nucleotide sequence that comprises at least one, at least two, at least three, at least four, at least five, at least six, or at least seven mutations as compared to any naturally occurring sequence.

[0126] By “reduces” is meant a negative alteration of at least 10%, 25%, 50%, 75%, or 100%.

[0127] By “reference” is meant a standard or control condition. In one embodiment, the reference is a wild-type or healthy cell. In other embodiments and without limitation, a reference is an untreated cell that is not subjected to a test condition, or is subjected to placebo or normal saline, medium, buffer, and/or a control vector that does not harbor a polynucleotide of interest. In embodiments, a reference is a cell that has not been treated according to the methods provided herein, a cell associated with a disease or disorder, or a healthy cell. In embodiments, a reference is a subject diagnosed with an alpha-1 antitrypsin deficiency and not treated, not recently treated (i.e., within 1 month, 6 months, 1 year, 5 years, or 10 years), or prior to treatment, according to the methods provided herein and/or using a composition provided herein. In some embodiments, a reference is a healthy subject. In some embodiments, the reference is at an earlier time point in treatment.

[0128] A “reference sequence” is a defined sequence used as a basis for sequence comparison. A reference sequence may be a subset of or the entirety of a specified sequence; for example, a segment of a full-length cDNA or gene sequence, or the complete cDNA or gene sequence. For polypeptides, the length of the reference polypeptide sequence will generally be at least about 16 amino acids, at least about 20 amino acids, at least about 25 amino acids, about 35 amino acids, about 50 amino acids, or about 100 amino acids. For nucleic acids, the length of the reference nucleic acid sequence will generally be at least about 50 nucleotides, at least about 60 nucleotides, at least about 75 nucleotides, about 100 nucleotides or about 300 nucleotides or any integer thereabout or therebetween. In some embodiments, a reference sequence is a wild-type sequence of a protein of interest. In other embodiments, a reference sequence is a polynucleotide sequence encoding a wild-type protein.

[0129] The terms “RNA-programmable nuclease,” and “RNA-guided nuclease” refer to a nuclease that forms a complex with (e.g., binds or associates with) one or more RNA(s) that is not a target for cleavage. In some embodiments, an RNA-programmable nuclease, when in a complex with an RNA, may be referred to as a nuclease-RNA complex. Typically, the bound RNA(s) is referred to as a guide RNA (gRNA).

[0130] The term “single nucleotide polymorphism (SNP)” refers to a variation in a single nucleotide that occurs at a specific position in the genome, where each variation is present to some appreciable degree within a population (e.g., >1%). SNPs can fall within coding regions of genes, non-coding regions of genes, or in the intergenic regions (regions between genes). In some embodiments, SNPs within a coding sequence do not necessarily change the amino acid sequence of the protein that is produced, due to degeneracy of the genetic code. SNPs in the coding region are of two types: synonymous and nonsynonymous SNPs. Synonymous SNPs do not affect the protein sequence, while nonsynonymous SNPs change the amino acid sequence of protein. The nonsynonymous SNPs are of two types: missense and nonsense. SNPs that are not in protein-coding regions can still affect gene splicing, transcription factor binding, messenger RNA degradation, or the sequence of noncoding RNA. Gene expression affected by this type of SNP is referred to as an eSNP (expression SNP) and can be upstream or downstream from the gene. A single nucleotide variant (SNV) is a variation in a single nucleotide without any limitations of frequency and can arise in somatic cells. A somatic single nucleotide variation can also be called a single-nucleotide alteration.

[0131] By “specifically binds” is meant a nucleic acid molecule, polypeptide, polypeptide/polynucleotide complex, compound, or molecule that recognizes and binds a polypeptide and/or nucleic acid molecule of the disclosure, but which does not substantially recognize and bind other molecules in a sample, for example, a biological sample.

[0132] By “substantially identical” is meant a polypeptide or nucleic acid molecule exhibiting at least 50% identity to a reference amino acid sequence. In one embodiment, a reference sequence is a wild-type amino acid or nucleic acid sequence. In another embodiment, a reference sequence is any one of the amino acid or nucleic acid sequences described herein. In one embodiment, such a sequence is at least about 60%, 80%, 85%, 90%, 95%, 96%, 97%, 98%, 99%, 99.9%, or even 99.99%, identical at the amino acid level or nucleic acid level to the sequence used for comparison.

[0133] Sequence identity is typically measured using sequence analysis software (for example, Sequence Analysis Software Package of the Genetics Computer Group, University of Wisconsin Biotechnology Center, 1710 University Avenue, Madison, Wis. 53705, BLAST, BESTFIT, GAP, or PILEUP/PRETTYBOX programs). Such software matches identical or similar sequences by assigning degrees of homology to various substitutions, deletions, and/or other modifications. Conservative substitutions typically include substitutions within the following groups: glycine, alanine; valine, isoleucine, leucine; aspartic acid, glutamic acid, asparagine, glutamine; serine, threonine; lysine, arginine; and phenylalanine, tyrosine.

[0134] Nucleic acid molecules useful in the methods of the disclosure include any nucleic acid molecule that encodes a polypeptide of the disclosure or a functional fragment thereof.

[0135] Such nucleic acid molecules need not be 100% identical with an endogenous nucleic acid sequence but will typically exhibit substantial identity. Polynucleotides having “substantial identity” to an endogenous sequence are typically capable of hybridizing with at least one strand of a double-stranded nucleic acid molecule. Nucleic acid molecules useful in the methods of the disclosure include any nucleic acid molecule that encodes a polypeptide of the disclosure or a functional fragment thereof. Such nucleic acid molecules need not be 100% identical with an endogenous nucleic acid sequence but will typically exhibit substantial identity. Polynucleotides having “substantial identity” to an endogenous sequence are typically capable of hybridizing with at least one strand of a double-stranded nucleic acid molecule. By “hybridize” is meant pair to form a double-stranded molecule between complementary polynucleotide sequences (e.g., a gene described herein), or portions thereof, under various conditions of stringency. (See, e.g., Wahl, G. M. and S. L. Berger (1987) Methods Enzymol. 152:399; Kimmel, A. R. (1987) Methods Enzymol. 152:507).

[0136] By “split” is meant divided into two or more fragments.

[0137] A “split polypeptide” or “split protein” refers to a protein that is provided as an N-terminal fragment and a C-terminal fragment translated as two separate polypeptides from a nucleotide sequence(s). The polypeptides corresponding to the N-terminal portion and the C-terminal portion of the split protein may be spliced in some embodiments to form a “reconstituted” protein. In embodiments, the split polypeptide is a nucleic acid programmable DNA binding protein (e.g. a Cas9) or a base editor.

[0138] The term “target site” refers to a nucleotide sequence or nucleobase of interest within a nucleic acid molecule that is modified. In embodiments, the modification is deamination of a base. The deaminase can be a cytidine or an adenine deaminase. The fusion protein or base editing complex comprising a deaminase may comprise a dCas9-adenosine deaminase fusion protein, a Cas12b-adenosine deaminase fusion, or a base editor disclosed herein.

[0139] As used herein, the terms “treat,” treating,” “treatment,” and the like refer to reducing or ameliorating a disorder and/or symptoms associated therewith or obtaining a desired pharmacologic and/or physiologic effect. It will be appreciated that, although not precluded, treating a disorder or condition does not require that the disorder, condition or symptoms associated therewith be completely eliminated. In some embodiments, the effect is therapeutic, i.e., without limitation, the effect partially or completely reduces, diminishes, abrogates, abates, alleviates, reduces the intensity of, or cures a disease and/or adverse symptom attributable to the disease. In some embodiments, the effect is preventative, i.e., the effect protects or prevents an occurrence or reoccurrence of a disease or condition. To this end, the presently disclosed methods comprise administering a therapeutically effective amount of a composition as described herein.

[0140] As used herein, the term “vector” refers to a means of introducing a nucleic acid molecule into a cell, resulting in a transformed cell. Vectors include plasmids, transposons, phages, viruses, liposomes, lipid nanoparticles, and episomes.

[0141] Ranges provided herein are understood to be shorthand for all of the values within the range. For example, a range of 1 to 50 is understood to include any number, combination of numbers, or sub-range from the group consisting 1, 2, 3, 4, 5, 6, 7, 8, 9, 10, 11, 12, 13, 14, 15, 16, 17, 18, 19, 20, 21, 22, 23, 24, 25, 26, 27, 28, 29, 30, 31, 32, 33, 34, 35, 36, 37, 38, 39, 40, 41, 42, 43, 44, 45, 46, 47, 48, 49, or 50.

[0142] The recitation of a listing of chemical groups in any definition of a variable herein includes definitions of that variable as any single group or combination of listed groups. The recitation of an embodiment for a variable or aspect herein includes that embodiment as any single embodiment or in combination with any other embodiments or portions thereof.

[0143] All terms are intended to be understood as they would be understood by a person skilled in the art. Unless defined otherwise, all technical and scientific terms used herein have the same meaning as commonly understood by one of ordinary skill in the art to which the disclosure pertains

[0144] In this application, the use of the singular includes the plural unless specifically stated otherwise. It must be noted that, as used in the specification, the singular forms “a,” “an” and “the” include plural referents unless the context clearly dictates otherwise. In this application, the use of “or” means “and/or” unless stated otherwise. Furthermore, use of the term “including” as well as other forms, such as “include”, “includes,” and “included,” is not limiting.

[0145] As used in this specification and claim(s), the words “comprising” (and any form of comprising, such as “comprise” and “comprises”), “having” (and any form of having, such as “have” and “has”), “including” (and any form of including, such as “includes” and “include”) or “containing” (and any form of containing, such as “contains” and “contain”) are inclusive or open-ended. This wording indicates that specified elements, features, components, and/or method steps are present, but does not exclude the presence of other elements, features, components, and/or method steps. Any embodiments specified as “comprising” a particular component(s) or element(s) are also contemplated as “consisting of” or “consisting essentially of” the particular component(s) or element(s) in some embodiments. It is contemplated that any embodiment discussed in this specification can be implemented with respect to any method or composition of the present disclosure, and vice versa. Furthermore, compositions of the present disclosure can be used to achieve methods of the present disclosure.

[0146] The term “about” or “approximately” means within an acceptable error range for the particular value as determined by one of ordinary skill in the art, which will depend in part on how the value is measured or determined, i.e., the limitations of the measurement system.

[0147] Reference in the specification to “some embodiments,” “an embodiment,” “one embodiment” or “other embodiments” means that a particular feature, structure, or characteristic described in connection with the embodiments is included in at least some embodiments, but not necessarily all embodiments, of the present disclosures.

### BRIEF DESCRIPTION OF THE DRAWINGS

[0148] FIG. 1 depicts a SERPINA1 correction editing strategy with an adenosine base editor. The nucleotide sequence shown in FIG. 1 corresponds to SEQ ID NO: 430 (ATC GAC AAG AAA GGG ACT GAA GC). The amino acid sequence shown in FIG. 1 corresponds to SEQ ID NO: 431 (IDKKGTEA).

[0149] FIG. 2 are schematics depicting yeast-based screens and structure-based design to optimize editors to improve selectivity for NGC PAM and the A1AT target site.

[0150] FIG. 3 is a schematic representation of a screening and rational design plan to develop improved adenosine base editors (ABEs) for targeting SERPINA1.

[0151] FIG. 4 is a graph showing editing efficiency in patient derived fibroblast cells (PiZZ cells), which were transfected with mRNA encoding the indicated variants and synthetic guides by electroporation.

[0152] FIGS. 5A-5D show editing efficiency of ABEs using different linker sequences. Wild-type HEK293T cells were transfected in 96-well format and each well contains plasmids expressing base editor variants and plasmids expressing guides. To evaluate on-target editing efficiency, each editor was co-transfected with plasmids expressing guides targeting A1 target site without E342K mutation. FIG. 5A shows % A to G editing at position A5. FIG. 5B shows linker EGGSEEEEESGS (pYY-1359/1379) (SEQ ID NO: 432). FIG. 5C shows the ratio of A5/A8 editing. FIG. 5D shows the % max A to G editing of ABE variants. In FIG. 5D, each set of three bars corresponds from left-to-right to “OT1,” “OT2,” and “OT4-A7G,” respectively.

[0153] FIGS. 6A-6B are graphs showing % A to G editing. FIG. 6A shows positions A7 and A5. FIG. 6B shows OT1-A7, OT2-A5, and OT4-A5. Patient derived fibroblast cells (PiZZ cells) were transfected with mRNA encoding for indicated variants (by plasmid number) and synthetic guides using lipofectamine messengerMax. Editing was shown for indicated As in the editing window. 50 ng mRNA and 25 ng guide RNA were used for each well containing 18K cells, and data is collected 24 h after transfection. In FIG. 6B, each set of three bars corresponds from left-to-right to “OT1-A7,” “OT2-A5,” and “OT4-A5,” respectively.

[0154] FIGS. 7A-7B are graphs showing % A to G editing. FIG. 7A shows positions A7 and A5. FIG. 7B shows OT1-A7, OT2-A5, and OT4-A5. Patient derived fibroblast cells (PiZZ cells) were transfected with mRNA encoding for indicated variants (by plasmid number) and synthetic guides using lipofectamine messengerMax. Editing was shown for indicated As in the editing window. 25 ng mRNA and 25 ng guide RNA were used for each well containing 18K cells, and data is collected 72 h after transfection. In FIG. 7B, each set of three bars corresponds from left-to-right to “OT1-A7,” “OT2-A5,” and “OT4-A5,” respectively.

[0155] FIG. 8 is a graph showing % A to G editing in patient derived fibroblast cells (PiZZ cells), which were transfected with mRNA encoding for indicated variants derived from var 12 (mutations in TadA) and synthetic guides using lipofectamine messengerMax.

[0156] FIG. 9 is a graph showing % A to G editing in Patient derived fibroblast cells (PiZZ cells), which were transfected with mRNA encoding for indicated variants derived from var 12 (mutations in TadA) and synthetic guides using lipofectamine messengerMax.

[0157] FIG. 10 is a graph showing % A to G editing in patient derived fibroblast cells (PiZZ cells), which were transfected with mRNA encoding for indicated variants derived from var 12 (mutations in NGC Cas9) and synthetic guides using lipofectamine messengerMax.

[0158] FIG. 11 is a graph showing % A to G editing in patient derived fibroblast cells (PiZZ cells), which were transfected with mRNA encoding for indicated variants derived from var 12 (mutations in NGC Cas9) and synthetic guides using lipofectamine messengerMax.

[0159] FIG. 12 is a graph showing % A to G editing in patient derived fibroblast cells (PiZZ cells), which were transfected with mRNA encoding for indicated variants derived from var 12 with TadA5 (mutations in TadA) and synthetic guides using lipofectamine messengerMax.

[0160] FIG. 13 is a graph showing % A to G editing in patient derived fibroblast cells (PiZZ cells), which were transfected with mRNA encoding for indicated variants derived from var 12 (mutations in NGC Cas9) and synthetic guides using lipofectamine messengerMax.

[0161] FIG. 14 is a graph showing % A to G editing in patient derived fibroblast cells (PiZZ cells), which were transfected with mRNA encoding for indicated variants derived from var 12 (mutations in NGC Cas9) and synthetic guides using lipofectamine messengerMax.

[0162] FIG. 15 is a graph showing % A to G editing in patient derived fibroblast cells (PiZZ cells), which were transfected with mRNA encoding for indicated variants derived from var 12 (mutations in NGC Cas9) and synthetic guides using lipofectamine messengerMax.

[0163] FIG. 16 is a graph showing % A to G editing in patient derived fibroblast cells (PiZZ cells), which were transfected with mRNA encoding for indicated variants derived from var 12 (mutations in NGC Cas9) and synthetic guides using lipofectamine messengerMax.

[0164] FIG. 17 is a graph showing % base editing efficiency using patient fibroblasts that carry the PiZ mutation, which were electroporated with mRNA encoding editor variants and gRNA856 to assess on-target correction editing and off-target editing at a candidate site (OT454) using amplicon sequencing.

[0165] FIG. 18 is a graph showing average % max A to G editing in patient fibroblasts that carry the PiZ mutation, which were electroporated with mRNAs encoding 11 editor variants and gRNA856 to assess guide-dependent off-target editing at 6 candidate OT sites using amplicon sequencing. All editor variants tested had average OT editing lower than that observed for var12 codon optimized.

[0166] FIG. 19 is a graph showing % editing efficiency of 11 editor variants and guide RNA 856, which were tested alongside var12 codon optimized in vivo in NSG-PiZ mice at a sub-saturating dose of 0.25 mpk. Liver editing was assessed using NGS.

[0167] FIGS. 20A-20B show in vivo assessments of ABE variants on serum A1AT levels. FIG. 20A shows serum A1AT levels in mice treated with ABE variants. FIG. 20B shows fold-change A1AT levels in mice treated with ABE variants.

[0168] FIG. 21 shows data for ABE editor Variants A, B, E, F, G, H, I, J, and K, which show a decrease in number of off target (OT) sites relative to codon optimized variant 12. Variant G shows improvement across most criteria including improved in vivo on-target editing, similar bystander editing and lower number of guide-dependent off target (OT) sites.

[0169] FIGS. 22A-22C show improved efficacy of ABE Variant G in vivo. FIG. 22A shows editing efficiency of ABE Variant G in mice. FIG. 22B shows serum A1AT levels of mice treated with ABE Variant G. FIG. 22C shows fold increase in functional A1AT of mice treated with ABE Variant G. In FIG. 22A, each three sets of datapoints correspond, respectively, to “Beneficial Edits,” “Bystander Edits,” and “Indels.”

[0170] FIG. 23 provides a schematic diagram providing a description of alpha-1 antitrypsin deficiency (AATD). Direct correction of the PiZ mutation through base editing may: 1) reduce liver toxicity caused by the mutant Z-AAT protein (i.e., an AAT protein encoded by a SERPINA1 gene having the PiZ mutation) aggregates (referred to as polymers); 2) restore circulating functional AAT and decrease circulating Z-AAT polymers to protect lungs.

[0171] FIG. 24 provides a schematic diagram providing an overview of a strategy for correcting the PiZ mutation using base editing. A base editor system is delivered to a subject by administering a lipid nanoparticle (LNP) comprising mRNA encoding a base editor polypeptide and a guide RNA. The lipid nanoparticle may be referred to as a “base editor system LNP.” Correction of the PiZ mutation results in the M (medium mobility) allele (PiM) of the A1AT gene.

[0172] FIGS. 25A and 25B provide a schematic diagram and stacked bar graph relating to the in vivo correction of the PiZ mutation in an AATD mouse model (also referred to as NSG-PiZ mice). FIG. 25A provides a schematic diagram presenting the method used to correct the PiZ mutation in the AATD mouse model. FIG. 25B provides a stacked bar graph showing maximum percent A to G editing measured in mice administered the indicated mg/kg (mpk) of total RNA (1:1 mass ratio of the guide polynucleotide gRNA856 and mRNA encoding Variant G). The mice were administered lipid nanoparticles containing a base editor system containing an mRNA encoding a base editor (ABE Variant G) and the guide RNA gRNA856. Beneath the stacked bar graph of FIG. 25B is provided the sequence targeted for base editing (i.e., ATCGACAAGAAAGGGACTGAAGCTGCTG, (SEQ ID NO: 593), where the nucleotide in bold is the target nucleotide, the underlined nucleotides are additional nucleotides that were within the editing window of the base editor (i.e., “additional base-edited alleles”), and the double-underlined nucleotides correspond to a PAM sequence) and the amino acid sequence encoded thereby (i.e., IDKKGTEAA (SEQ ID NO: 594)). In each of the stacked bars of FIG. 25B, the bars within each stacked bar are as follows from bottom-to-top: additional base-edited alleles; corrected alleles; and indels.

[0173] FIGS. 26A and 26B provide a plot and a stacked bar graph demonstrating that base editing in vivo to correct the PiZ mutation in an AATD mouse model resulted in increased serum total and corrected AAT and decreased serum PiZ AAT levels. The data of FIGS. 26A and 26B was collected using mice treated as described for FIGS. 25A and 25B. FIG. 26A provides a plot showing levels of total AAT (left axis and upper curve) and total PiZ AAT (right axis and lower curve) in the AATD mice FIG. 26B provides a stacked bar graph showing the percent of AAT in the serum of AATD mice corresponding to corrected AAT and PiZ AAT. The AATD mice were administered the indicated mg/kg (mpk) of total RNA (1:1 mass ratio of the guide polynucleotide gRNA856 and mRNA encoding Variant G). In each of the stacked bars of FIG. 25B, the bars within each stacked bar are as follows from bottom-to-top: corrected AAT and PiZ AAT. In FIGS. 26A and 26B measurements were taken one week after administering the base editor system to the mice.

[0174] FIGS. 27A and 27B provide a schematic diagram and a plot demonstrating that base editing in vivo to correct the PiZ mutation in an AATD mouse model resulted in increased functional serum AAT. The mice were treated as described for FIGS. 25A and 25B. FIG. 27A provides a schematic diagram showing how levels of functional AAT in the serum of mice was measured. FIG. 27B provides a bar graph showing levels of functional AAT in mice prior to administration of the base editor system (pre-dose) and after administration of base editor systems containing the indicated mg/kg (mpk) doses of total RNA (1:1 mass ratio of the guide polynucleotide gRNA856 and mRNA encoding Variant G). For each pair of bars in FIG. 27B, the left bar represents a pre-dose measurement, and the right bar represents a post-dose measurement.

[0175] FIG. 28 provides a stacked bar graph demonstrating that correction of the PiZ mutation in an AATD mouse model using base editing was durable. The AATD mice were treated as described in FIGS. 25A and 25B and maximum percent A to G base editing was measured at 1 week and 2 weeks following administration of the base editor system. In each of the stacked bars of FIG. 28, the bars within each stacked bar are as follows from bottom-to-top: additional base-edited alleles; corrected alleles; and indels.

[0176] FIGS. 29A and 29B provide a schematic diagram and a bar graph presenting a new knock-out/knock-in humanized PiZ rat. The rat SerpinA1 gene was knocked out in the rats and the human SERPINA1 gene with the c.1096G>A (PiZ) mutation was knocked in at the rat SerpinA1 locus. FIG. 29A provides a schematic diagram showing how the genomes of rats were edited to create a humanized PiZ rat with expression of the rat Serpin1 gene knocked out. A human SERPINA1 polynucleotide encoding an AAT polynucleotide containing the c.1096G>A PiZ mutation (i.e., the human PiZ allele) and also encoding a Simian virus 40 PolyA tail (SV40-pA) was inserted into the genome of the rats between the rat Serpin1 gene 5′ untranslated region (UTR) and Exon 1 of the rat Serpin1 gene. The rats had a Sprague-Dawley genomic background, were immunocompetent, did not express rat AAT, contained a 1-to-1 knock-in of huSERPINA1 c.1096G>A (PiZ) within each rat Serpin1 allele, and expressed about 3.6 μM of the human PiZ polypeptide at 18 weeks following genome editing. The rats were referred to as “hSERPINA1 PiZ rats.” FIG. 29B provides a bar graph demonstrating that rats homozygous for the human PiZ allele did not express rat AAT. In FIG. 29B, “MS” indicates mass spectrometry, “WT” indicates wild-type, “HET” indicates heterozygous for the human PiZ allele and the rat SERPINA1 allele, and “HOM” indicates homozygous for the human PiZ allele.

[0177] FIGS. 30A and 30B provide a schematic diagram and a stacked bar graph demonstrating that correction of the PiZ mutation in hSERPINA1 PiZ rats (see FIGS. 29A and 29B) using base editor systems was dose-dependent. FIG. 29A provides a schematic diagram presenting the method used to correct the PiZ mutation in the hSERPINA1 PiZ rats. The rats were administered lipid nanoparticles containing a base editor system containing the guide polynucleotide gRNA856 and an mRNA molecule encoding a base editor (ABE Variant G). FIG. 30B provides a stacked bar graph showing maximum percent A to G editing measured in rats administered the indicated mg/kg (mpk) total RNA (1:1 mass ratio of the guide polynucleotide gRNA856 and mRNA encoding Variant G). Beneath the stacked bar graph of FIG. 30B is provided the sequence targeted for base editing (i.e., ATCGACAAGAAAGGGACTGAAGCTGCTG, (SEQ ID NO: 593), where the nucleotide in bold is the target nucleotide, the underlined nucleotides are additional nucleotides that were within the editing window of the base editor (i.e., “additional base-edited alleles”), and the double-underlined nucleotides correspond to a PAM sequence) and the amino acid sequence encoded thereby (i.e., IDKKGTEAA (SEQ ID NO: 594)). In each of the stacked bars of FIG. 30, the bars within each stacked bar are as follows from bottom-to-top: additional base-edited alleles; corrected alleles; and indels.

[0178] FIGS. 31A and 31B provide a plot and a stacked bar graph demonstrating that base editing in vivo to correct the PiZ mutation in hSERPINA1 PiZ rats resulted in increased serum total and corrected AAT and decreased serum PiZ AAT levels. The data of FIGS. 31A and 31B was collected using rats treated as described for FIGS. 30A and 30B. FIG. 30A provides a plot showing levels of total AAT (left axis and upper curve) and total PiZ AAT (right axis and lower curve) in the hSERPINA1 PiZ rats. FIG. 31B provides a stacked bar graph showing the percent of AAT in the serum of hSERPINA1 PiZ rats corresponding to corrected AAT and PiZ AAT. The hSERPINA1 PiZ rats were administered the indicated mg/kg (mpk) of total RNA (1:1 mass ratio of the guide polynucleotide gRNA856 and mRNA encoding Variant G). In each of the stacked bars of FIG. 30B, the bars within each stacked bar are as follows from bottom-to-top: corrected AAT and PiZ AAT. In FIGS. 26A and 26B measurements were taken one week after administering the base editor system to the mice.

[0179] FIG. 32 provides a schematic diagram summarizing the effects of using base editing to correct a PiZ mutation to restore SERPINA1 gene function.

[0180] FIGS. 33A to 33C provide a schematic diagram, tissue images, and a bar graph showing that correction of the PiZ mutation in mice treated using base editing as described for FIGS. 25A and 25B led to decreased liver Z-AAT aggregates (i.e., aggregates of an AAT protein encoded by a SERPINA1 gene having the PiZ mutation) in mice. The mice were administered a base editor system containing 0.25 mpk of total RNA (1:1 mass ratio of the guide polynucleotide gRNA856 and mRNA encoding Variant G). FIG. 33A provides a schematic diagram showing how mice were treated and how AAT aggregates were measured. FIG. 33B shows PAS-D stained liver tissue from mice administered lipid nanoparticles containing the base editor system (lower panel) and in mice not administered the base editor system (i.e., “vehicle”; upper panel). FIG. 33C provides a bar graph showing levels of PAS-D staining in liver tissue from mice administered lipid nanoparticles containing the base editor system and in mice not administered the base editor system. The scale bar in FIG. 33B represent 200 μm.

[0181] FIGS. 34A and 34B provide a schematic diagram and a bar graph demonstrating that the 5G+7G allele resulting from base editing of the PiZ allele of SERPINA1 yields a D365G AAT protein that is secreted by the liver at levels comparable to the PiM allele (the wild-type allele) of SERPINA1. FIG. 34A provides a schematic diagram providing a summary of nucleotide edits and corresponding A1AT mutants prepared by treating mice according to the method described for FIGS. 25A and 25B. The nucleotide sequence shown in FIG. 34A is ATCGACAAGAAAGGGACTGAAGCTGCTG (SEQ ID NO: 593), where the nucleotide in bold is the A7 target nucleotide, the underlined nucleotide is the A5 bystander nucleotide, and the double-underlined nucleotides correspond to a PAM sequence. The amino acid sequence encoded by the nucleotide sequence of FIG. 34A is shown beneath the nucleotide sequence and is IDKKGTEAA (SEQ ID NO: 594). FIG. 34B provides a bar graph demonstrating that levels of AAT protein secreted from cells containing the 5G+7G allele of SERPINA1 were comparable to those secreted from cells containing the PiM allele of SERPINA1. In FIG. 34B, the bars each represent, from left-to-right, the following: Unedited; A7; A5; and A5+A7.

[0182] FIG. 35 provides a plot demonstrating that the 5G+7G allele resulting from base editing of the PiZ allele of SERPINA1 (see FIG. 34A) yielded a D365G AAT protein that functioned comparably to an AAT protein encoded by the PiM allele of SERPINA1. The D365G AAT protein inhibited neutrophil elastase comparably to wild-type AAT encoded by the PiM allele of SERPINA1.

[0183] FIG. 36 provides a plot demonstrating that levels of AAT encoded by a PiZ allele altered through base editing to encode the amino acid D365G (“Corrected AAT”), as shown in FIG. 34A, correlated with increased in functional AAT in mice treated as described for FIGS. 25A and 25B. Functional AAT levels were measured as described for FIGS. 27A and 27B.

[0184] FIGS. 37A and 37B provide a schematic diagram and a stacked bar graph demonstrating increased editing in AATD mice (also referred to as NSG-PiZ mice) following a second administration of a base editor system. FIG. 37A provides a schematic diagram presenting the method used to correct the PiZ mutation in the AATD mouse model. The mice were administered lipid nanoparticles containing a base editor system containing an mRNA encoding a base editor (ABE Variant G) and the guide RNA gRNA856 twice with the second administration taking place about two weeks after the first. FIG. 37B provides a stacked bar graph showing maximum percent A to G editing measured in the mice at two weeks following the second administration of the base editor system. The mice were administered the indicated mg/kg (mpk) of total RNA (1:1 mass ratio of the guide polynucleotide gRNA856 and mRNA encoding Variant G). In each of the stacked bars of FIG. 37B, the bars within each stacked bar are as follows from bottom-to-top: additional base-edited alleles; corrected alleles; and indels.

[0185] FIG. 38 provides images showing that correction of the PiZ mutation in mice according to the method described for FIGS. 25A and 25B led to decreased liver Z-AAT aggregates (i.e., aggregates of an AAT protein encoded by a SERPINA1 gene having the PiZ mutation) in AATD mice at one-week following administration of the base editor system. The scale bars in FIG. 38 represent 350 μm.

[0186] FIG. 39 provides a plot demonstrating that wild type alpha-1 antitrypsin (AAT) protein (PiM) was secreted comparably to an AAT protein with a D365G alteration (PiM+bystander) in vivo. PiM AAT and PiM+bystander AAT levels resulting from editing of PiZ mouse hepatocytes using a base editor system containing the guide gRNA856 and mRNA encoding the base editor ABE Variant G correlated similarly to serum AAT levels of the corresponding proteins in vivo, indicating similar secretion of both proteins from the liver. In FIG. 39, “Allelic Editing” indicates the percent of hepatocytes in the mice containing the indicated allele (i.e., PiM or PiM+Bystander).

[0187] FIGS. 40A to 40C provide plots and a stacked bar graph demonstrating that a human alpha-1 antitrypsin (hAAT or AAT) protein with a D365G alteration (PiM+bystander) was functionally active and indistinguishable from a wild type hAAT protein (piM) in vitro and ex vivo. FIG. 40A provides a plot presenting data from a neutrophil elastase (NE) binding assay. FIG. 40B provides a plot presenting data from a NE inhibition assay. FIG. 40C provides a plot showing serum AAT levels and functional AAT levels measured as NE inhibition in mice administered the indicated doses of lipid nanoparticles containing a base editor system containing gRNA856 and mRNA encoding the base editor ABE variant G (the “Variant G Formulation”). In the stacked bar graphs of FIG. 40C each of the bars from left-to-right represent, from bottom-to-top the following: 1) PiZ; 2) PiM, PiM+Bystander, PiZ, and 3) PiZ+Bystander; and PiM, PiM+Bystander, PiZ, and PiZ+Bystander. Functional activity of recombinant PiM+bystander was comparable to PiM (wildtype) protein based on both human neutrophil elastase (NE) binding in vitro (FIG. 40A) and enzymatic inhibition assays (FIG. 40B). Corrected AAT (i.e., a combination of PiM+bystander and PiM AAT polypeptides) in serum was mostly PiM+bystander AAT in mice administered the dose of 2 mpk and correlated with functional AAT, e.g., the capacity to inhibit human NE (dots) ex vivo (FIG. 40C). In FIGS. 40A to 40C doses represent amounts of total RNA.

[0188] FIGS. 41A and 41B provide bar graphs demonstrating that hepatocytes that expressed PiM+Bystander AAT proteins demonstrated a survival advantage in NSG-PiZ mice. FIG. 41A provides a bar graph showing editing efficiency for the indicated edits (i.e., PiZ+Bystander; PiM+Bystander (D365G); and PiM (WT)) in NSG-PiZ mice administered the Variant G Formulation. FIG. 41B provides a bar graph showing serum levels of the indicated proteins (i.e., PiM (WT); PiM+Bystander (D365G); PiZ; and PiZ+Bystander) in NSG-PiZ mice administered the Variant G Formulation. Each set of bars in FIG. 41A correspond, from left-to-right, to PiZ+Bystander, PiM+Bystander (D365G), and PiM (WT), respectively. Each set of three bars in FIG. 41B correspond, from left-to-right to PiM (WT), PiM+Bystander (D365G), PiZ, and PiZ+Bystander, respectively. PiM indicates a wild-type alpha-1 antitrypsin (AAT) protein, PiM+Bystander indicates a wild-type AAT protein altered to include a D365G alteration, PiZ+Bystander indicates a PiZ AAT protein altered to include a D365G alteration, and PiZ indicates a PiZ AAT protein.

[0189] FIG. 42 provides a stacked bar graph demonstrating increased levels of hepatocyte base editing in PiZ Rats administered a second dose (“double”) rather than a single dose (“single”) of the Variant G Formulation. In FIG. 42, “Corrected Alleles” indicates total PiM alleles and PiM+Bystander alleles, “Additional base-edited alleles” indicates alleles other than PiM alleles and PiM+Bystander alleles, excluding insertion/deletion variants of AAT, and “Indels” indicates insertion/deletion variants of AAT. For each stacked bar of FIG. 42, the following are represented from bottom-to-top: “Additional base-edited alleles”, “Corrected alleles”, and “Indels”. In FIG. 42, doses represent amounts of total RNA.

[0190] FIGS. 43A and 43B provide stacked bar graphs demonstrating durable editing of liver cells in PiZ-Rats using the Variant G Formulation. FIG. 43A provides a stacked bar graph showing levels of each of the indicated alleles over time in PiZ rats administered the Variant G Formulation. FIG. 43B provides a stacked bar graph showing levels of each of the indicated proteins (“proteoforms”) in the blood serum of PiZ rats administered the Variant G formulation. In FIGS. 43A and 43B, “Corrected Alleles” indicates total PiM alleles and PiM+Bystander alleles, “Additional base-edited alleles” indicates alleles other than PiM alleles and PiM+Bystander alleles, Z-AAT indicates an AAT protein encoded by a SERPINA1 gene having the PiZ mutation, and “Vehicle” indicates PiZ rats that were not administered the Variant G Formulation.

[0191] FIGS. 44A and 44B provide bar graphs demonstrating a durable decrease in liver PiZ AAT in PiZ rats after dosing with the Variant G Formulation (i.e., lipid nanoparticles containing a base editor system containing gRNA856 and mRNA encoding the base editor ABE variant G). FIG. 44A provides a bar graph showing liver PiZ AAT levels in PiZ rats one week after administration of the Variant G Formulation. FIG. 44B provides a bar graph showing liver PiZ AAT levels in PiZ rats at 1 week and 14 weeks after administration of the Variant G Formulation at a dose of 0.5 mpk. Protein levels were measured using liquid chromatography-mass spectrometry (LC-MS). In each of FIGS. 44A and 44B, the first set of four bars from the left correspond to male rats and the set of four bars closest to the right correspond to female rats. The indicated doses represent amounts of total RNA.

[0192] FIG. 45 provides a bar graph showing improved hepatocyte base editing in PiZ rats administered the Variant G Formulation as opposed to a formulation containing an alternative lipid nanoparticle. The first three bars from the left correspond to PiZ rats administered the Variant G Formulation and the three bars closest to the right correspond to PiZ rats administered a formulation containing a lipid nanoparticle different from that used in the Variant G Formulation containing guide gRNA856 and mRNA encoding the base editor ABE Variant G. Each stacked bar of FIG. 45 represents from bottom-to-top “Additional base-edited alleles”, “Corrected alleles”, and “Indels”. In FIG. 45, “Corrected Alleles” indicates total PiM alleles and PiM+Bystander alleles, “Additional base-edited alleles” indicates alleles other than PiM alleles and PiM+Bystander alleles, and excluding insertion/deletion variants, “Indels” indicates insertion/deletion variants of AAT, and “Saline” indicates PiZ rats that were not administered the Variant G Formulation.

[0193] FIG. 46 provides a plot showing relative frequencies of on-target base-edited, corrected SERPINA1 alleles (i.e., PiM and PiM+Bystander alleles) in the liver of male and female NSG-PiZ mice one week after administration of the indicated doses of the Variant G Formulation. Doses of Variant G Formulation are expressed as total RNA. Horizontal lines represent group means, error bars represent SD, and circles represent values for individual mice. All male mice administered 0.05 mg/kg of Variant G Formulation and all female mice administered 2.0 mg/kg of Variant G Formulation were excluded from the data analysis at Day 7 due to discrepancy in sample ID assignment during collection.

[0194] FIG. 47 provides plots showing a correlation between relative frequency of on-target base-edited, corrected SERPINA1 alleles (i.e., PiM and PiM+Bystander alleles) in liver and levels of total human AAT and PiZ AAT variants in the serum of male and female NSG-PiZ mice one week after administration of the Variant G Formulation. Data points represent levels of total human AAT (triangles) and of PiZ AAT variants (squares) in the serum of individual mice. Nonlinear regression fit curves and R² values are indicated.

[0195] FIG. 48 provides a plot showing relative levels (vs Day 2) of functional AAT in the serum of male and female NSG-PiZ mice one week after administration of the Variant G Formulation. Doses of Variant G Formulation are expressed as total RNA. Horizontal lines represent group means, error bars represent SD, and circles represent values for individual mice. The horizontal dashed line represents the 1-fold relative level.

[0196] FIG. 49 provides a plot showing relative frequencies of on-target base-edited, corrected SERPINA1 alleles in the liver of male and female NSG-PiZ mice one and 13 weeks after administration of the Variant G Formulation at a total RNA dose of 0.25 mg/kg. Doses of Variant G Formulation are expressed as total RNA. Horizontal lines represent group means, error bars represent SD, and circles represent values for individual mice. One male mouse administered vehicle was euthanized before the end of the study due to fight wounds; no samples were collected at Week 13.

[0197] FIG. 50 provides a plot showing relative levels (vs Day 3) of total human AAT in the serum of male and female NSG-PiZ mice 1, 4, and 13 weeks after administration of a total RNA dose of 0.25 mg/kg of the Variant G Formulation. Doses of Variant G Formulation are expressed as total RNA. Horizontal lines represent group means, error bars represent SD, and symbols represent values for individual mice. The horizontal dashed line represents the 1-fold relative level. One male mouse administered vehicle was euthanized before the end of the study due to fight wounds; no samples were collected at Week 13.

[0198] FIG. 51 provides a plot showing relative levels (vs Day 3) of functional AAT in the serum of male and female NSG-PiZ mice 1 and 13 weeks after administration of the Variant G formulation at a dose of 0.25 mg/kg total RNA. Doses of the Variant G Formulation are expressed as total RNA. Horizontal lines represent group means, error bars represent SD, and circles represent values for individual mice. The horizontal dashed line represents the 1-fold relative level.

[0199] FIG. 52 provides a plot showing levels of human PiZ AAT protein in the serum of male and female PiZ rats at week 26 (6 month study) following administration of the Variant G Formulation. Circles represent individual male (M) and female (F) rats, and horizontal lines represent group median.

[0200] FIG. 53 presents plots showing longitudinal changes in the levels of human PiZ AAT protein in the serum of male and female PiZ rats (1-year study). Circles represent individual measurements and lines connect longitudinal measurements for each rat.

[0201] FIG. 54 provides a plot showing relative frequencies of on-target base-edited, corrected SERPINA1 alleles in the liver of male and female PiZ rats one week after administration of the Variant G Formulation. Doses of Variant G Formulation are expressed as total RNA. Horizontal lines represent group means, error bars represent SD, and circles represent values for individual rats. One of 5 male rats administered 1.0 mg/kg of Variant G Formulation was excluded from the analysis because the full Variant G Formulation dose was not injected.

[0202] FIG. 55 provides a plot showing relative abundance of PiZ AAT variants in the liver of male and female PiZ rats one week after administration of the Variant G Formulation (vs abundance in the liver of vehicle control rats). Doses of Variant G Formulation are expressed as total RNA. Symbols represent the mean abundances of PiZ AAT variants observed in each study group, normalized to the mean values observed in the vehicle control group.

[0203] FIG. 56 provides plots showing a correlation between the relative frequency of on-target base-edited, corrected SERPINA1 alleles in the liver and the levels of total human AAT and PiZ AAT variants in the serum of male and female PiZ rats one week after administration of the Variant G Formulation. Data points represent levels of total human AAT (triangles) and of PiZ AAT variants (squares) in the serum of individual rats. Nonlinear regression fit curves and R2 values are indicated.

[0204] FIG. 57 provides a plot showing relative frequencies of on-target base-edited, corrected SERPINA1 alleles in the liver of PiZ rats one and 14 weeks after administration of a total RNA dose of 0.50 mg/kg of the Variant G Formulation. Doses of Variant G Formulation are expressed as total RNA. Horizontal lines represent group means, error bars represent SD, and circles represent values for individual rats.

[0205] FIG. 58 provides a plot showing relative levels (vs Day 2) of total human AAT in the serum of male and female PiZ rats 1, 4, and 14 weeks after administration of a total RNA dose of 0.50 mg/kg of the Variant G Formulation. Data shown correspond to Group 1 (vehicle control; evaluated at Week 1), Group 2 (Variant G Formulation; evaluated at Week 1), and Group 3 (Variant G Formulation; evaluated at Weeks 4 and 5). Horizontal lines represent group means, error bars represent SD, and circles represent values for individual rats. The horizontal dashed line represents the mean total AAT value observed in the serum of control rats at Day −2.

[0206] FIG. 59 provides plots showing mean relative abundance of corrected AAT and PiZ AAT variants in the serum of male and female PiZ rats 1, 4, and 14 weeks after administration of a total RNA dose of 0.50 mg/kg of the Variant G Formulation. Data shown correspond to Group 2 (Variant G Formulation; evaluated at Week 1) and Group 3 (Variant G Formulation; evaluated at Day −2, Week 4, and Week 14). Data points represent mean relative abundance values of corrected AAT (circles) and PiZ AAT variants (triangles) for individual rats. Horizontal ticks represent group means and error bars represent SD. “D-2” represents the Day −2 baseline time point.

### DETAILED DESCRIPTION

[0207] As described below, the present invention features compositions and methods for altering mutations associated with alpha-1 antitrypsin deficiency (A1AD). In some embodiments, adenosine base editors, provided herein, correct a deleterious mutation, such that the edited polynucleotide is indistinguishable from a wild-type reference polynucleotide sequence. In some embodiments, such adenosine base editors, adenosine base editor systems, and methods of using the same have improved properties including e.g., increased on-target editing and decreased off-target editing. In another embodiment, the editing alters the deleterious mutation, such that the edited polynucleotide comprises a benign mutation.

[0208] The invention is based, at least in part, on the discovery that adenosine base editor variants can more efficiently and precisely edit a deleterious mutation associated with A1AD. Accordingly, the disclosure provides novel proteins and base editor variants capable of conferring improved base editor properties.

### Alpha-1 Antitrypsin Deficiency (A1AD)

[0209] Alpha-1 antitrypsin (A1A) is a protease inhibitor encoded by the SERPINA1 gene on chromosome 14 (FIG. 23). This glycoprotein is synthesized mainly in the liver and is secreted into the blood, with serum concentrations of 1.5-3.0 g/L (20-52 μmol/L) in healthy adults. It diffuses into the lung interstitium and alveolar lining fluid, where it inactivates neutrophil elastase, thereby protecting the lung tissue from protease-mediated damage. Alpha-1 antitrypsin deficiency (A1AD) is inherited in an autosomal codominant fashion. Over 100 genetic variants of the SERPINA1 gene have been described, but not all are associated with disease. The alphabetic designation of these variants is based on their speed of migration on gel electrophoresis. The most common variant is the M (medium mobility) allele (PiM), and the two most frequent deficiency alleles are PiS and PiZ (the latter having the slowest rate of migration). Several mutations have been described that produce no measurable serum protein; these are referred to as “null” alleles. The most common genotype is MM, which produces normal serum levels of alpha-1 antitrypsin. Most people with severe deficiency are homozygous for the Z allele (ZZ). More than 60,000 patients with A1AD in the United States have the severe ZZ phenotype. The Z protein misfolds and polymerizes during its production in the endoplasmic reticulum of hepatocytes; these abnormal polymers are trapped in the liver, greatly reducing the serum levels of alpha-1 antitrypsin. Deficient or unstable A1AT production causes liver and/or lung pathologies in patients afflicted with A1AD. The liver disease seen in patients with alpha-1 antitrypsin deficiency is caused by the accumulation of abnormal alpha-1 antitrypsin protein in hepatocytes and the consequent cellular responses, including autophagy, the endoplasmic reticulum stress response and apoptosis. Reduced circulating levels of alpha-1 antitrypsin lead to increased neutrophil elastase activity in the lungs; this imbalance of protease and antiprotease results in the lung disease associated with this condition.

[0210] Alpha-1 antitrypsin deficiency (“A1AD”) is most common in Caucasians, and it most frequently affects the lungs and liver. In the lungs, the most common manifestation is early-onset (patients in their 30s and 40s) panacinar emphysema most pronounced in the lung bases. However, diffuse or upper lobe emphysema can occur, as can bronchiectasis. The most frequently described symptoms include dyspnea, wheezing and cough. Pulmonary function testing of affected individuals shows findings consistent with COPD; however, bronchodilator responsiveness may be observed and may be misdiagnosed as asthma. Liver disease caused by the ZZ genotype manifests in various ways. Affected infants can present in the newborn period with cholestatic jaundice, sometimes with acholic stools (pale or clay-colored) and hepatomegaly. Conjugated bilirubin, transaminases and gamma-glutamyl transferase levels in blood are elevated. Liver disease in older children and adults can present with an incidental finding of elevated transaminases or with signs of established cirrhosis, including variceal hemorrhage or ascites. Alpha-1 antitrypsin deficiency also predisposes patients to hepatocellular carcinoma. Although the homozygous ZZ genotype is necessary for liver disease to develop, a heterozygous Z mutation can act as a genetic modifier for other diseases by conferring a greater risk of more severe liver disease, such as in hepatitis C infection and cystic fibrosis liver disease.

The two most common clinical variants of A1AD are E264V (PiS) and E342K (PiZ) alleles. The clinical single nucleotide variant E342K (PiZ) leads to unstable and/or inactive A1AT protein and, as a consequence, causes liver and lung toxicities. Inheritance is autosomal codominant. More than a half of A1AD patients harbor at least one copy of the mutation E342K.

[0211] In some embodiments, the disease or disorder is alpha-1 antitrypsin deficiency (A1AD). In some embodiments, the pathogenic mutation is in gene SERPINA1. In some embodiments, the mutation of SERPINA1 is E342K (PiZ allele). In some embodiments, A at position 7 is edited to G to restore PiZ allele to a wild type allele.

### Editing of Target Genes

[0212] To produce the gene edits described above, cells within or collected from a subject are contacted with one or more guide RNAs and a nucleobase editor polypeptide comprising a nucleic acid programmable DNA binding protein (napDNAbp) and a deaminase (see, e.g., FIG. 24). In some embodiments, cells to be edited are contacted with at least one nucleic acid, wherein the at least one nucleic acid encodes one or more guide RNAs and/or a nucleobase editor polypeptide comprising a nucleic acid programmable DNA binding protein (napDNAbp) and a deaminase. In some embodiments, the gRNA comprises nucleotide analogs. In some instances, the gRNA is added directly to a cell. These nucleotide analogs can inhibit degradation of the gRNA from cellular processes. Table 1 provides representative guide polynucleotide sequences suitable for use in methods, base editor systems, and/or compositions of the disclosure. Any guide polynucleotide sequence provided in the disclosure may be suitable for use in methods, base editor systems, and/or compositions of the disclosure.

[0213] Variants of the spacer sequences listed in Table 1 comprising 1, 2, 3, 4, or 5 nucleobase alterations are contemplated. For example, variation of a target polynucleotide sequence within a population (e.g., single nucleotide polymorphisms) may require said alterations to a spacer sequence to allow the spacer to better bind a variant of a target sequence in a subject.

[0214] In various instances, it is advantageous for a spacer sequence to include a 5′ and/or a 3′ “G” nucleotide. In some cases, for example, any spacer sequence or guide polynucleotide provided herein comprises or further comprises a 5′ “G”, where, in some embodiments, the 5′ “G” is or is not complementary to a target sequence. In some embodiments, the 5′ “G” is added to a spacer sequence that does not already contain a 5′ “G.” For example, it can be advantageous for a guide RNA to include a 5′ terminal “G” when the guide RNA is expressed under the control of a U6 promoter or the like because the U6 promoter prefers a “G” at the transcription start site (see Cong, L. et al. “Multiplex genome engineering using CRISPR/Cas systems. Science 339:819-823 (2013) doi: 10.1126/science.1231143). In some cases, a 5′ terminal “G” is added to a guide polynucleotide that is to be expressed under the control of a promoter but is optionally not added to the guide polynucleotide if or when the guide polynucleotide is not expressed under the control of a promoter.

TABLE 1
Guide polynucleotide sequences for correcting
pathogenic mutations.

| | | Pathogenic | Base | gRNA Targetin | |
|---|---|---|---|---|---|
| | Gene | Mutation | Editor | Sequence | PAM |
| 1. | SERPINA1 | E342K | ABE | GACAAGAAAGGGA | NGC |
| | | | | CUGAAGC (SEQ | |
| | | | | ID NO: 433) | |
| 2. | SERPINA1 | E342K | ABE | AUCGACAAGAAAG | NGC |
| | | | | GGACUGA (SEQ | |
| | | | | ID NO: 434) | |
| 3. | SERPINCI | R48C | ABE | ACACACCGGUUGG | NGG |
| | | | | UGGCCUC( SEQ | |
| | | (R79C) | | ID NO: 435) | |

### Nucleobase Editors

[0215] Useful in the methods and compositions described herein are nucleobase editors (alternatively, base editors) that edit, modify or alter a target nucleotide sequence of a polynucleotide. Nucleobase editors described herein typically include a polynucleotide programmable nucleotide binding domain and a nucleobase editing domain (e.g., an adenosine deaminase). A polynucleotide programmable nucleotide binding domain, when in conjunction with a bound guide polynucleotide (e.g., gRNA), can specifically bind to a target polynucleotide sequence and thereby localize the base editor to the target nucleic acid sequence desired to be edited.

[0216] Some aspects of the disclosure provide variants of adenosine base editors (ABEs). In some embodiments, the ABE variants provided herein are useful for targeting a mutation in a SERPINA1 gene, for example a E342K (PiZ allele) mutation in SERPINA1. In some embodiments, the base editors are useful for treating a disease or disorder, such as alpha-1 antitrypsin deficiency (A1AD). In some embodiments, an A at position 7 is edited to G to restore PiZ allele to a wild type allele. A schematic representation of an exemplary target A at position 7 in SERPINA1 is shown in FIG. 1, which is indicated as “Target” in FIG. 1.

[0217] In some embodiments, the disclosure provides variants of ABE Variant 12. An amino acid sequence of ABE Variant 12 is provided herein. In the below sequence of ABE Variant 12, the amino acid sequence of TadA*7.10 (L36H, I76Y, V82T, Y147T, Q154S, and N157K) is indicated with bold; the amino acid sequence of the linker is indicated with underlining, the amino acid sequence of SpCas9-MQKFRAER nickase is indicated with italics, and the amino acid sequence of the NLS is indicated with bold and underlining.

(SEQ ID NO: 436)
SEVEFSHEYWMRHALTLAKRARDEREVPVGAVLVHNNRVIGEGWNRAIGLHD
PTAHAEIMALRQGGLVMQNYRLYDATLYTTFEPCVMCAGAMIHSRIGRVVFGV
RNAKTGAAGSLMDVLHYPGMNHRVEITEGILADECAALLCTFFRMPRSVFKAQ
KKAQSSTDSGGSSGGSSGSETPGTSESATPESSGGSSGGSDKKYSIGLAIGTNSVGWAVI
TDEYKVPSKKFKVLGNTDRHSIKKNLIGALLFDSGETAEATRLKRTARRRYTRRKNRICYLQ
EIFSNEMAKVDDSFFHRLEESFLVEEDKKHERHPIFGNIVDEVAYHEKYPTIYHLRKKLVD
STDKADLRLIYLALAHMIKFRGHFLIEGDLNPDNSDVDKLFIQLVQTYNQLFEENPINASG
VDAKAILSARLSKSRRLENLIAOLPGEKKNGLFGNLIALSLGLTPNFKSNFDLAEDAKLOLS
KDTYDDDLDNLLAQIGDQYADLFLAAKNLSDAILLSDILRVNTEITKAPLSASMVKRYDEH
HODLTLLKALVROQLPEKYKEIFFDQSKNGYAGYIDGGASQEEFYKFIKPILEKMDGTEEL
LVKLNREDLLRKORTFDNGIIPHQIHLGELHAILRRQGDFYPFLKDNREKIEKILTFRIPYY
VGPLARGNSRFAWMTRKSEETITPWNFEEVVDKGASAOSFIERMTNFDKNLPNEKVLPKH
SLLYEYFTVYNELTKVKYVTEGMRKPAFLSGEQKKAIVDLLFKTNRKVTVKOLKEDYFKKI
ECFDSVEISGVEDRFNASLGTYHDLLKIIKDKDFLDNEENEDILEDIVLTLTLFEDREMIEE
RLKTYAHLFDDKVMKOLKRLRYTGWGRLSRKLINGIRDKQSGKTILDFLKSDGFANRNFM
QLIHDDSLTFKEDIQKAQVSGQGDSLHEHIANLAGSPAIKKGILQTVKVVDELVKVMGGH
KPENIVIEMARENOTTQKGQKNSRERMKRIEEGIKELGSQILKEHPVENTQLQNEKLYLYY
LQNGRDMYVDQELDINRLSDYDVDHIVPQSFLKDDSIDNKVLTRSDKNRGKSDNVPSEEV
VKKMKNYWROLLNAKLITORKFDNLTKAERGGLSELDKAGFIKROLVETROITKHVAQIL
DSRMNTKYDENDKLIREVKVITLKSKLVSDFRKDFOFYKVREINNYHHAHDAYLNAVVGT
ALIKKYPKLESEFVYGDYKVYDVRKMIAKSEQEIGKATAKYFFYSNIMNFFKTEITLANGEI
RKRPLIETNGETGEIVWDKGRDFATVRKVLSMPQVNIVKKTEVQTGGFSKESILPKGNSDK
LIARKKDWDPKKYGGFMOPTVAYSVLVVAKVEKGKSKKLKSVKELLGITIMERSSFEKNPI
DFLEAKGYKEVKKDLIIKLPKYSLFELENGRKRMLASAKFLOKGNELALPSKYVNFLYLAS
HYEKLKGSPEDNEOKOLFVEOHKHYLDEIIEOISEFSKRVILADANLDKVLSAYNKHRDKP
IREQAENIIHLFTLTNLGAPRAFKYFDTTIARKEYRSTKEVLDATLIHQSITGLYETRIDLS
QLGGDEGADKRTADGSEFESPKKKRKV (ABE Variant 12)

[0218] An exemplary codon-optimized nucleotide sequence encoding ABE Variant 12 is provided below:

(SEQ ID NO: 437)
TCAGAAGTCGAGTTTAGCCACGAATATTGGATGCGCCACGCCCTCACCCTGGCCAAGAGAGC
CCGGGACGAGCGCGAGGTGCCCGTGGGCGCCGTCCTGGTGCACAACAACAGGGTGATCGGCG
AGGGCTGGAACCGGGCCATCGGCCTGCACGACCCCACAGCCCACGCCGAGATCATGGCCCTG
CGGCAGGGTGGCCTGGTCATGCAGAACTACAGGCTGTATGACGCCACCCTGTACACCACATT
CGAGCCCTGCGTGATGTGCGCCGGGGCCATGATCCACAGCCGGATCGGCCGCGTGGTGTTCG
GCGTGCGGAACGCCAAGACCGGCGCCGCCGGCAGCCTGATGGACGTTCTGCACTACCCCGGG
ATGAACCACAGGGTGGAGATCACAGAGGGCATCCTGGCAGACGAGTGCGCCGCCCTGCTGTG
CACTTTCTTCAGGATGCCCAGATCTGTGTTCAAGGCCCAGAAGAAGGCCCAGAGCTCCACCG
ACAGCGGCGGGAGCTCTGGGGGCTCCTCCGGGAGCGAGACCCCCGGGACCAGCGAGTCCGCC
ACCCCCGAGAGCAGCGGCGGCAGCTCCGGGGGGAGCGACAAGAAGTACTCCATCGGCCTGGC
CATCGGCACCAACTCCGTGGGTTGGGCCGTGATCACCGATGAGTACAAGGTGCCCAGCAAGA
AGTTCAAGGTGCTGGGCAACACCGACAGGCACTCTATCAAGAAGAACCTGATCGGCGCCCTG
CTGTTCGACAGCGGGGAGACCGCTGAGGCCACTCGGCTGAAGAGAACCGCCAGGCGCAGATA
CACCCGGAGAAAGAACCGGATCTGCTACCTGCAGGAGATCTTCAGCAACGAGATGGCCAAGG
TGGACGACAGCTTCTTCCACAGGCTGGAGGAGAGCTTCCTGGTGGAGGAGGACAAGAAGCAC
GAGCGCCACCCCATCTTCGGCAACATCGTGGATGAGGTGGCCTACCACGAGAAGTACCCCAC
CATCTACCACCTGCGGAAGAAGCTGGTGGACAGCACCGATAAGGCCGATCTGCGGCTGATCT
ACCTGGCCCTGGCCCACATGATCAAGTTCAGGGGGCACTTCCTGATCGAGGGCGACCTGAAC
CCCGACAACTCCGATGTGGATAAACTGTTCATCCAGCTGGTGCAGACCTACAACCAGCTGTT
TGAGGAGAATCCCATCAACGCCTCCGGCGTGGACGCCAAGGCCATCCTGAGCGCCCGGCTGT
CCAAGAGCCGGAGGCTGGAGAATCTGATCGCCCAGCTGCCTGGCGAGAAGAAGAACGGCCTG
TTCGGCAACCTGATCGCCCTGAGCCTGGGCCTGACCCCCAATTTCAAGAGCAACTTCGACCT
GGCCGAGGATGCTAAGCTGCAGCTGTCCAAGGACACCTACGACGATGACCTGGACAACCTGC
TGGCTCAGATCGGCGATCAGTACGCCGACCTGTTCCTGGCCGCCAAGAACCTGTCAGACGCC
ATCCTGCTGTCTGACATTCTGCGGGTGAACACCGAGATCACCAAGGCCCCACTGTCCGCCTC
TATGGTGAAGAGGTACGATGAGCACCACCAGGACCTGACCCTGCTGAAGGCTCTGGTGCGGC
AGCAGCTGCCGGAGAAGTACAAGGAGATCTTCTTCGACCAGAGCAAGAACGGCTACGCCGGC
TACATCGACGGCGGGGCCAGCCAGGAGGAGTTCTACAAGTTCATCAAGCCTATCCTGGAGAA
GATGGACGGCACCGAGGAGCTGCTGGTGAAGCTGAACCGGGAGGACCTGCTGCGGAAGCAGA
GGACCTTCGACAACGGCATCATTCCCCACCAGATCCACCTGGGCGAGCTGCACGCCATCCTG
CGGAGGCAGGGCGACTTCTACCCTTTCCTGAAGGACAACAGGGAGAAGATCGAGAAGATCCT
GACCTTCAGGATCCCCTACTACGTGGGCCCCCTGGCCCGCGGCAACTCCCGCTTTGCCTGGA
TGACCAGAAAGAGCGAGGAGACCATCACCCCTTGGAACTTCGAGGAGGTGGTGGACAAGGGC
GCCAGCGCCCAGAGCTTCATCGAGCGCATGACCAACTTCGACAAGAATCTGCCCAACGAGAA
GGTGCTGCCCAAGCACTCCCTGCTGTACGAGTACTTCACCGTGTACAACGAGCTGACAAAGG
TGAAGTACGTGACAGAGGGCATGCGCAAGCCCGCCTTCCTGTCTGGCGAGCAGAAGAAGGCC
ATCGTGGACCTGCTGTTCAAGACCAACAGGAAGGTGACCGTGAAGCAGCTGAAGGAGGACTA
CTTCAAGAAGATCGAGTGCTTCGACAGCGTGGAGATCAGCGGCGTGGAGGACAGGTTCAACG
CCAGCCTGGGCACCTACCACGACCTGCTGAAGATCATCAAGGACAAGGACTTCCTGGATAAC
GAGGAGAACGAGGATATCCTGGAGGACATTGTCCTGACCCTGACCCTGTTCGAGGATCGGGA
GATGATCGAGGAGCGCCTCAAGACCTACGCCCACCTGTTCGACGATAAGGTGATGAAGCAGC
TGAAGCGGCTGCGCTACACCGGCTGGGGCCGCCTGTCCCGGAAGCTGATCAACGGCATCCGG
GACAAGCAGTCCGGCAAGACCATCCTGGACTTCCTGAAGTCCGATGGTTTTGCCAACAGAAA
CTTCATGCAGCTGATCCACGACGACAGCCTGACCTTCAAGGAGGACATCCAGAAGGCTCAGG
TGTCCGGACAGGGGGACTCCCTGCACGAGCACATCGCCAACCTGGCCGGCTCTCCCGCCATC
AAGAAGGGCATCCTGCAGACCGTGAAGGTGGTGGACGAGCTGGTGAAGGTGATGGGCGGGCA
CAAGCCCGAGAACATCGTGATCGAGATGGCCCGGGAGAACCAGACCACCCAGAAGGGCCAGA
AGAACAGCAGGGAGCGCATGAAGCGCATCGAGGAGGGCATCAAGGAGCTGGGTAGCCAGATC
CTGAAGGAGCACCCTGTGGAGAATACCCAGCTGCAGAACGAGAAGCTGTATCTGTACTACCT
GCAGAACGGCAGGGACATGTACGTGGATCAGGAGCTGGACATCAACCGGCTGTCTGACTACG
ACGTGGACCACATCGTGCCCCAGTCTTTCCTGAAGGACGACAGCATCGACAACAAGGTGCTG
ACCCGCAGCGACAAGAACAGGGGCAAGAGCGATAACGTGCCCTCCGAGGAGGTGGTCAAGAA
GATGAAGAACTACTGGCGGCAGCTGCTGAACGCCAAGCTGATCACCCAGCGGAAGTTCGACA
ACCTGACCAAGGCCGAGAGAGGCGGCCTGTCCGAGCTGGACAAGGCCGGCTTCATCAAGCGG
CAGCTGGTGGAGACCCGGCAGATCACCAAGCACGTCGCCCAGATCCTGGACTCCAGGATGAA
CACCAAGTACGACGAGAACGACAAGCTGATCAGAGAGGTGAAGGTGATCACCCTGAAGTCCA
AGCTGGTGAGCGACTTCAGGAAGGATTTCCAGTTCTACAAGGTGCGGGAGATCAACAACTAT
CACCACGCCCACGACGCCTACCTGAACGCCGTCGTGGGCACCGCTCTGATCAAGAAGTATCC
TAAGCTGGAGAGCGAGTTCGTGTACGGCGACTACAAGGTGTACGACGTGCGGAAGATGATCG
CCAAGAGCGAGCAGGAGATCGGCAAGGCCACCGCCAAGTACTTCTTCTACTCCAATATCATG
AACTTCTTCAAGACCGAGATCACCCTGGCCAACGGGGAGATCCGGAAGCGCCCACTGATCGA
GACCAACGGCGAGACCGGCGAGATCGTGTGGGACAAGGGCAGGGACTTCGCCACCGTGAGGA
AGGTGCTGTCCATGCCCCAGGTGAACATCGTGAAAAAGACCGAGGTGCAGACCGGGGGGTTC
TCCAAGGAGAGCATCCTGCCCAAGGGCAACAGCGACAAGCTGATCGCCCGGAAGAAGGACTG
GGACCCCAAGAAGTACGGAGGCTTCATGCAGCCTACCGTGGCCTACTCCGTGCTGGTGGTGG
CCAAGGTGGAGAAGGGCAAGTCCAAGAAGCTGAAGTCAGTGAAGGAGCTGCTGGGCATCACC
ATCATGGAGCGGTCTAGCTTCGAGAAGAATCCTATTGACTTCCTGGAGGCCAAGGGCTACAA
GGAGGTCAAGAAGGATCTGATCATCAAGCTGCCCAAGTACAGCCTGTTCGAGCTGGAGAATG
GCCGGAAGAGGATGCTGGCCAGCGCCAAGTTCCTGCAGAAGGGCAACGAGCTGGCCCTGCCC
AGCAAGTACGTGAACTTCCTCTATCTGGCCAGCCACTACGAGAAGCTGAAGGGCTCTCCAGA
GGACAACGAGCAGAAGCAGCTGTTCGTGGAGCAGCACAAGCACTACCTGGACGAGATCATCG
AGCAGATCTCCGAGTTCAGCAAGCGCGTGATCCTGGCCGACGCCAACCTGGACAAGGTGCTG
TCCGCTTACAACAAGCACAGGGACAAGCCCATCAGGGAGCAGGCCGAGAACATCATCCACCT
GTTCACCCTGACCAACCTGGGCGCCCCCAGGGCCTTCAAGTACTTCGATACCACCATCGCCA
GGAAGGAGTACAGAAGTACTAAGGAGGTCCTGGATGCCACTCTGATCCACCAGAGCATCACC
GGGCTGTACGAGACCCGGATCGACCTGTCCCAGCTGGGCGGCGACGAGGGCGCCGACAAGCG
GACAGCCGACGGCAGCGAGTTCGAGAGCCCCAAGAAGAAGCGGAAGGTG.

[0219] In some embodiments, the ABE variant comprises the adenosine deaminase (TadA*7.10 L36H, I76Y, V82T, Y147T, Q154S, and N157K). In some embodiments, ABE Variants A-K, provided herein, comprise the adenosine deaminase TadA*7.10 (L36H, I76Y, V82T, Y147T, Q154S, and N157K). Table 2 shows the configuration of ABE variants A-K, indicating the mutations in SpCas9-MQKFRAER nickase and the linker sequences. Each ABE variant listed in the table comprises the adenosine deaminase TadA*7.10 (L36H, I76Y, V82T, Y147T, Q154S, and N157K) and the NLS amino acid sequence

(SEQ ID NO: 438)
EGADKRTADGSEFESPKKKRKV.

TABLE 2
A summary of ABE Variants A-K.

| | ABE | SpCas9-MQKFRAER | | SEQ |
|---|---|---|---|---|
| Plasmid | Variant | nickcase mutant | Linker | ID NO |
| pMSP1115 | Variant A | R1337K | SGGSSGGSSGSE | 357 |
| | | | TPGTSESATPESS | |
| | | | GGSSGGS | |
| pMSP1116 | Variant B | Q1136Y, and R1337K | SGGSSGGSSGSE | 357 |
| | | | TPGTSESATPESS | |
| | | | GGSSGGS | |
| pMSP1130 | Variant C | M1135L, Q1136Y, | EGGSEEEEESGS | 432 |
| | | and R1337K | | |
| pMSP1131 | Variant D | Q1136Y, and R1337K | EGGSEEEEESGS | 432 |
| pMSP1132 | Variant E | M1135L, Q1136Y, | KGPKPKKEESEK | 439 |
| | | and R1337K | | |
| pMSP1160 | Variant F | M1135L, A1283D, | SGGSSGGSSGSE | 357 |
| | | Q1136Y, and R1337K | TPGTSESATPESS | |
| | | | GGSSGGS | |
| pMSP1167 | Variant G | M1135L, A1283D, | SGGSSGGSSGSE | 357 |
| | | E1250K, and R1337K | TPGTSESATPESS | |
| | | | GGSSGGS | |
| pMSP1168 | Variant H | A1283D, E1250K, | SGGSSGGSSGSE | 357 |
| | | and Q1136Y | TPGTSESATPESS | |
| | | | GGSSGGS | |
| pMSP1177 | Variant I | M1135L, A1283D, | KGPKPKKEESEK | 439 |
| | | Q1136Y, and R1337K | | |
| pMSP1179 | Variant J | M1135L, A1283D, | SGGSSGGSSGSE | 357 |
| | | Q1136Y, R1337K, | TPGTSESATPESS | |
| | | R765A, and Q768A | GGSSGGS | |
| pMSP1188 | Variant K | A1283D, E1250K, | KGPKPKKEESEK | 439 |
| | | and Q1136Y | | |

[0220] Exemplary polypeptide sequences for Variants A-K are provided below. In the below sequences of Variants A-K, the amino acid sequence of the TadA is indicated with bold; the amino acid sequence of the linker is indicated with underlining, the amino acid sequence of the SpCas9-MQKFRAER nickase mutant is indicated with italics, and the amino acid sequence of the NLS is indicated with bold and underlining.

### Variant A Amino Acid Sequence:

(SEQ ID NO: 440)
SEVEFSHEYWMRHALTLAKRARDEREVPVGAVLVHNNRVIGEGWNRAIGLHDPTAHAEIMAL
RQGGLVMQNYRLYDATLYTTFEPCVMCAGAMIHSRIGRVVFGVRNAKTGAAGSLMDVLHYPG
MNHRVEITEGILADECAALLCTFFRMPRSVFKAQKKAQSSTDSGGSSGGSSGSETPGTSESA
TPESSGGSSGGSDKKYSIGLAIGTNSVGWAVITDEYKVPSKKFKVLGNTDRHSIKKNLIGAL
LFDSGETAEATRLKRTARRRYTRRKNRICYLQEIFSNEMAKVDDSFFHRLEESFLVEEDKKH
ERHPIFGNIVDEVAYHEKYPTIYHLRKKLVDSTDKADLRLIYLALAHMIKFRGHFLIEGDLN
PDNSDVDKLFIQLVQTYNQLFEENPINASGVDAKAILSARLSKSRRLENLIAQLPGEKKNGL
FGNLIALSLGLTPNFKSNFDLAEDAKLQLSKDTYDDDLDNLLAQIGDQYADLFLAAKNLSDA
ILLSDILRVNTEITKAPLSASMVKRYDEHHQDLTLLKALVRQQLPEKYKEIFFDQSKNGYAG
YIDGGASQEEFYKFIKPILEKMDGTEELLVKLNREDLLRKQRTFDNGIIPHQIHLGELHAIL
RRQGDFYPFLKDNREKIEKILTFRIPYYVGPLARGNSRFAWMTRKSEETITPWNFEEVVDKG
ASAQSFIERMTNFDKNLPNEKVLPKHSLLYEYFTVYNELTKVKYVTEGMRKPAFLSGEQKKA
IVDLLFKTNRKVTVKQLKEDYFKKIECFDSVEISGVEDRFNASLGTYHDLLKIIKDKDFLDN
EENEDILEDIVLTLTLFEDREMIEERLKTYAHLFDDKVMKQLKRLRYTGWGRLSRKLINGIR
DKQSGKTILDFLKSDGFANRNFMQLIHDDSLTFKEDIQKAQVSGQGDSLHEHIANLAGSPAI
KKGILQTVKVVDELVKVMGGHKPENIVIEMARENQTTQKGQKNSRERMKRIEEGIKELGSQI
LKEHPVENTQLQNEKLYLYYLQNGRDMYVDQELDINRLSDYDVDHIVPQSFLKDDSIDNKVL
TRSDKNRGKSDNVPSEEVVKKMKNYWRQLLNAKLITQRKFDNLTKAERGGLSELDKAGFIKR
QLVETRQITKHVAQILDSRMNTKYDENDKLIREVKVITLKSKLVSDFRKDFQFYKVREINNY
HHAHDAYLNAVVGTALIKKYPKLESEFVYGDYKVYDVRKMIAKSEQEIGKATAKYFFYSNIM
NFFKTEITLANGEIRKRPLIETNGETGEIVWDKGRDFATVRKVLSMPQVNIVKKTEVQTGGF
SKESILPKGNSDKLIARKKDWDPKKYGGFMQPTVAYSVLVVAKVEKGKSKKLKSVKELLGIT
IMERSSFEKNPIDFLEAKGYKEVKKDLIIKLPKYSLFELENGRKRMLASAKFLQKGNELALP
SKYVNFLYLASHYEKLKGSPEDNEQKQLFVEQHKHYLDEIIEQISEFSKRVILADANLDKVL
SAYNKHRDKPIREQAENIIHLFTLTNLGAPRAFKYFDTTIARKEYKSTKEVLDATLIHQSIT
GLYETRIDLSQLGGDEGADKRTADGSEFESPKKKRKV.

### Variant B Amino Acid Sequence:

(SEQ ID NO: 441)
SEVEFSHEYWMRHALTLAKRARDEREVPVGAVLVHNNRVIGEGWNRAIGLHDPTAHAEIMAL
RQGGLVMQNYRLYDATLYTTFEPCVMCAGAMIHSRIGRVVFGVRNAKTGAAGSLMDVLHYPG
MNHRVEITEGILADECAALLCTFFRMPRSVFKAQKKAQSSTDSGGSSGGSSGSETPGTSESA
TPESSGGSSGGSDKKYSIGLAIGTNSVGWAVITDEYKVPSKKFKVLGNTDRHSIKKNLIGAL
LFDSGETAEATRLKRTARRRYTRRKNRICYLQEIFSNEMAKVDDSFFHRLEESFLVEEDKKH
ERHPIFGNIVDEVAYHEKYPTIYHLRKKLVDSTDKADLRLIYLALAHMIKFRGHFLIEGDLN
PDNSDVDKLFIQLVQTYNQLFEENPINASGVDAKAILSARLSKSRRLENLIAQLPGEKKNGL
FGNLIALSLGLTPNFKSNFDLAEDAKLQLSKDTYDDDLDNLLAQIGDQYADLFLAAKNLSDA
ILLSDILRVNTEITKAPLSASMVKRYDEHHQDLTLLKALVRQQLPEKYKEIFFDQSKNGYAG
YIDGGASQEEFYKFIKPILEKMDGTEELLVKLNREDLLRKQRTFDNGIIPHQIHLGELHAIL
RRQGDFYPFLKDNREKIEKILTFRIPYYVGPLARGNSRFAWMTRKSEETITPWNFEEVVDKG
ASAQSFIERMTNFDKNLPNEKVLPKHSLLYEYFTVYNELTKVKYVTEGMRKPAFLSGEQKKA
IVDLLFKTNRKVTVKQLKEDYFKKIECFDSVEISGVEDRFNASLGTYHDLLKIIKDKDFLDN
EENEDILEDIVLTLTLFEDREMIEERLKTYAHLFDDKVMKQLKRLRYTGWGRLSRKLINGIR
DKQSGKTILDFLKSDGFANRNFMQLIHDDSLTFKEDIQKAQVSGQGDSLHEHIANLAGSPAI
KKGILQTVKVVDELVKVMGGHKPENIVIEMARENQTTQKGQKNSRERMKRIEEGIKELGSQI
LKEHPVENTQLQNEKLYLYYLQNGRDMYVDQELDINRLSDYDVDHIVPQSFLKDDSIDNKSE
VEFSHEYWMRHALTLAKRARDEREVPVGAVLVHNNRVIGEGWNRAIGLHDPTAHAEIMALRQ
GGLVMQNYRLYDATLYTTFEPCVMCAGAMIHSRIGRVVFGVRNAKTGAAGSLMDVLHYPGMN
HRVEITEGILADECAALLCTFFRMPRSVFKAQKKAQSSTDVLTRSDKNRGKSDNVPSEEVVK
KMKNYWRQLLNAKLITQRKFDNLTKAERGGLSELDKAGFIKRQLVETRQITKHVAQILDSRM
NTKYDENDKLIREVKVITLKSKLVSDFRKDFQFYKVREINNYHHAHDAYLNAVVGTALIKKY
PKLESEFVYGDYKVYDVRKMIAKSEQEIGKATAKYFFYSNIMNFFKTEITLANGEIRKRPLI
ETNGETGEIVWDKGRDFATVRKVLSMPQVNIVKKTEVQTGGFSKESILPKGNSDKLIARKKD
WDPKKYGGFMYPTVAYSVLVVAKVEKGKSKKLKSVKELLGITIMERSSFEKNPIDFLEAKGY
KEVKKDLIIKLPKYSLFELENGRKRMLASAKFLQKGNELALPSKYVNFLYLASHYEKLKGSP
EDNEQKQLFVEQHKHYLDEIIEQISEFSKRVILADANLDKVLSAYNKHRDKPIREQAENIIH
LFTLTNLGAPRAFKYFDTTIARKEYKSTKEVLDATLIHQSITGLYETRIDLSQLGGDEGADK
RTADGSEFESPKKKRKV.

### Variant C Amino Acid Sequence:

(SEQ ID NO: 442)
SEVEFSHEYWMRHALTLAKRARDEREVPVGAVLVHNNRVIGEGWNRAIGLHDPTAHAEIMAL
RQGGLVMQNYRLYDATLYTTFEPCVMCAGAMIHSRIGRVVFGVRNAKTGAAGSLMDVLHYPG
MNHRVEITEGILADECAALLCTFFRMPRSVFKAQKKAQSSTDEGGSEEEEESGSDKKYSIGL
AIGTNSVGWAVITDEYKVPSKKFKVLGNTDRHSIKKNLIGALLFDSGETAEATRLKRTARRR
YTRRKNRICYLQEIFSNEMAKVDDSFFHRLEESFLVEEDKKHERHPIFGNIVDEVAYHEKYP
TIYHLRKKLVDSTDKADLRLIYLALAHMIKFRGHFLIEGDLNPDNSDVDKLFIQLVQTYNQL
FEENPINASGVDAKAILSARLSKSRRLENLIAQLPGEKKNGLFGNLIALSLGLTPNFKSNFD
LAEDAKLQLSKDTYDDDLDNLLAQIGDQYADLFLAAKNLSDAILLSDILRVNTEITKAPLSA
SMVKRYDEHHQDLTLLKALVRQQLPEKYKEIFFDQSKNGYAGYIDGGASQEEFYKFIKPILE
KMDGTEELLVKLNREDLLRKQRTFDNGIIPHQIHLGELHAILRRQGDFYPFLKDNREKIEKI
LTFRIPYYVGPLARGNSRFAWMTRKSEETITPWNFEEVVDKGASAQSFIERMTNFDKNLPNE
KVLPKHSLLYEYFTVYNELTKVKYVTEGMRKPAFLSGEQKKAIVDLLFKTNRKVTVKQLKED
YFKKIECFDSVEISGVEDRFNASLGTYHDLLKIIKDKDFLDNEENEDILEDIVLTLTLFEDR
EMIEERLKTYAHLFDDKVMKQLKRLRYTGWGRLSRKLINGIRDKQSGKTILDFLKSDGFANR
NFMQLIHDDSLTFKEDIQKAQVSGQGDSLHEHIANLAGSPAIKKGILQTVKVVDELVKVMGG
HKPENIVIEMARENQTTQKGQKNSRERMKRIEEGIKELGSQILKEHPVENTQLQNEKLYLYY
LQNGRDMYVDQELDINRLSDYDVDHIVPQSFLKDDSIDNKVLTRSDKNRGKSDNVPSEEVVK
KMKNYWRQLLNAKLITQRKFDNLTKAERGGLSELDKAGFIKRQLVETRQITKHVAQILDSRM
NTKYDENDKLIREVKVITLKSKLVSDFRKDFQFYKVREINNYHHAHDAYLNAVVGTALIKKY
PKLESEFVYGDYKVYDVRKMIAKSEQEIGKATAKYFFYSNIMNFFKTEITLANGEIRKRPLI
ETNGETGEIVWDKGRDFATVRKVLSMPQVNIVKKTEVQTGGFSKESILPKGNSDKLIARKKD
WDPKKYGGFLYPTVAYSVLVVAKVEKGKSKKLKSVKELLGITIMERSSFEKNPIDFLEAKGY
KEVKKDLIIKLPKYSLFELENGRKRMLASAKFLQKGNELALPSKYVNFLYLASHYEKLKGSP
EDNEQKQLFVEQHKHYLDEIIEQISEFSKRVILADANLDKVLSAYNKHRDKPIREQAENIIH
LFTLTNLGAPRAFKYFDTTIARKEYKSTKEVLDATLIHQSITGLYETRIDLSQLGGDEGADK
RTADGSEFESPKKKRKV.

### Variant D Amino Acid Sequence:

(SEQ ID NO: 443)
SEVEFSHEYWMRHALTLAKRARDEREVPVGAVLVHNNRVIGEGWNRAIGLHDPTAHAEIMAL
RQGGLVMQNYRLYDATLYTTFEPCVMCAGAMIHSRIGRVVFGVRNAKTGAAGSLMDVLHYPG
MNHRVEITEGILADECAALLCTFFRMPRSVFKAQKKAQSSTDEGGSEEEEESGSDKKYSIGL
AIGTNSVGWAVITDEYKVPSKKFKVLGNTDRHSIKKNLIGALLFDSGETAEATRLKRTARRR
YTRRKNRICYLQEIFSNEMAKVDDSFFHRLEESFLVEEDKKHERHPIFGNIVDEVAYHEKYP
TIYHLRKKLVDSTDKADLRLIYLALAHMIKFRGHFLIEGDLNPDNSDVDKLFIQLVQTYNQL
FEENPINASGVDAKAILSARLSKSRRLENLIAQLPGEKKNGLFGNLIALSLGLTPNFKSNFD
LAEDAKLQLSKDTYDDDLDNLLAQIGDQYADLFLAAKNLSDAILLSDILRVNTEITKAPLSA
SMVKRYDEHHQDLTLLKALVRQQLPEKYKEIFFDQSKNGYAGYIDGGASQEEFYKFIKPILE
KMDGTEELLVKLNREDLLRKQRTFDNGIIPHQIHLGELHAILRRQGDFYPFLKDNREKIEKI
LTFRIPYYVGPLARGNSRFAWMTRKSEETITPWNFEEVVDKGASAQSFIERMTNFDKNLPNE
KVLPKHSLLYEYFTVYNELTKVKYVTEGMRKPAFLSGEQKKAIVDLLFKTNRKVTVKQLKED
YFKKIECFDSVEISGVEDRFNASLGTYHDLLKIIKDKDFLDNEENEDILEDIVLTLTLFEDR
EMIEERLKTYAHLFDDKVMKQLKRLRYTGWGRLSRKLINGIRDKQSGKTILDFLKSDGFANR
NFMQLIHDDSLTFKEDIQKAQVSGQGDSLHEHIANLAGSPAIKKGILQTVKVVDELVKVMGG
HKPENIVIEMARENQTTQKGQKNSRERMKRIEEGIKELGSQILKEHPVENTQLQNEKLYLYY
LQNGRDMYVDQELDINRLSDYDVDHIVPQSFLKDDSIDNKVLTRSDKNRGKSDNVPSEEVVK
KMKNYWRQLLNAKLITQRKFDNLTKAERGGLSELDKAGFIKRQLVETRQITKHVAQILDSRM
NTKYDENDKLIREVKVITLKSKLVSDFRKDFQFYKVREINNYHHAHDAYLNAVVGTALIKKY
PKLESEFVYGDYKVYDVRKMIAKSEQEIGKATAKYFFYSNIMNFFKTEITLANGEIRKRPLI
ETNGETGEIVWDKGRDFATVRKVLSMPQVNIVKKTEVQTGGFSKESILPKGNSDKLIARKKD
WDPKKYGGFMYPTVAYSVLVVAKVEKGKSKKLKSVKELLGITIMERSSFEKNPIDFLEAKGY
KEVKKDLIIKLPKYSLFELENGRKRMLASAKFLQKGNELALPSKYVNFLYLASHYEKLKGSP
EDNEQKQLFVEQHKHYLDEIIEQISEFSKRVILADANLDKVLSAYNKHRDKPIREQAENIIH
LFTLTNLGAPRAFKYFDTTIARKEYKSTKEVLDATLIHQSITGLYETRIDLSQLGGDEGADK
RTADGSEFESPKKKRKV.

### Variant E Amino Acid Sequence:

(SEQ ID NO: 444)
SEVEFSHEYWMRHALTLAKRARDEREVPVGAVLVHNNRVIGEGWNRAIGLHDPTAHAEIMAL
RQGGLVMQNYRLYDATLYTTFEPCVMCAGAMIHSRIGRVVFGVRNAKTGAAGSLMDVLHYPG
MNHRVEITEGILADECAALLCTFFRMPRSVFKAQKKAQSSTDKGPKPKKEESEKDKKYSIGL
AIGTNSVGWAVITDEYKVPSKKFKVLGNTDRHSIKKNLIGALLFDSGETAEATRLKRTARRR
YTRRKNRICYLQEIFSNEMAKVDDSFFHRLEESFLVEEDKKHERHPIFGNIVDEVAYHEKYP
TIYHLRKKLVDSTDKADLRLIYLALAHMIKFRGHFLIEGDLNPDNSDVDKLFIQLVQTYNQL
FEENPINASGVDAKAILSARLSKSRRLENLIAQLPGEKKNGLFGNLIALSLGLTPNFKSNFD
LAEDAKLQLSKDTYDDDLDNLLAQIGDQYADLFLAAKNLSDAILLSDILRVNTEITKAPLSA
SMVKRYDEHHQDLTLLKALVRQQLPEKYKEIFFDQSKNGYAGYIDGGASQEEFYKFIKPILE
KMDGTEELLVKLNREDLLRKQRTFDNGIIPHQIHLGELHAILRRQGDFYPFLKDNREKIEKI
LTFRIPYYVGPLARGNSRFAWMTRKSEETITPWNFEEVVDKGASAQSFIERMTNFDKNLPNE
KVLPKHSLLYEYFTVYNELTKVKYVTEGMRKPAFLSGEQKKAIVDLLFKTNRKVTVKQLKED
YFKKIECFDSVEISGVEDRFNASLGTYHDLLKIIKDKDFLDNEENEDILEDIVLTLTLFEDR
EMIEERLKTYAHLFDDKVMKQLKRLRYTGWGRLSRKLINGIRDKQSGKTILDFLKSDGFANR
NFMQLIHDDSLTFKEDIQKAQVSGQGDSLHEHIANLAGSPAIKKGILQTVKVVDELVKVMGG
HKPENIVIEMARENQTTQKGQKNSRERMKRIEEGIKELGSQILKEHPVENTQLQNEKLYLYY
LQNGRDMYVDQELDINRLSDYDVDHIVPQSFLKDDSIDNKVLTRSDKNRGKSDNVPSEEVVK
KMKNYWRQLLNAKLITQRKFDNLTKAERGGLSELDKAGFIKRQLVETRQITKHVAQILDSRM
NTKYDENDKLIREVKVITLKSKLVSDFRKDFQFYKVREINNYHHAHDAYLNAVVGTALIKKY
PKLESEFVYGDYKVYDVRKMIAKSEQEIGKATAKYFFYSNIMNFFKTEITLANGEIRKRPLI
ETNGETGEIVWDKGRDFATVRKVLSMPQVNIVKKTEVQTGGFSKESILPKGNSDKLIARKKD
WDPKKYGGFLYPTVAYSVLVVAKVEKGKSKKLKSVKELLGITIMERSSFEKNPIDFLEAKGY
KEVKKDLIIKLPKYSLFELENGRKRMLASAKFLQKGNELALPSKYVNFLYLASHYEKLKGSP
EDNEQKQLFVEQHKHYLDEIIEQISEFSKRVILADANLDKVLSAYNKHRDKPIREQAENIIH
LFTLTNLGAPRAFKYFDTTIARKEYKSTKEVLDATLIHQSITGLYETRIDLSQLGGDEGADK
RTADGSEFESPKKKRKV.

### Variant F Amino Acid Sequence:

(SEQ ID NO: 445)
SEVEFSHEYWMRHALTLAKRARDEREVPVGAVLVHNNRVIGEGWNRAIGLHDPTAHAEIMAL
RQGGLVMQNYRLYDATLYTTFEPCVMCAGAMIHSRIGRVVFGVRNAKTGAAGSLMDVLHYPG
MNHRVEITEGILADECAALLCTFFRMPRSVFKAQKKAQSSTDSGGSSGGSSGSETPGTSESA
TPESSGGSSGGSDKKYSIGLAIGTNSVGWAVITDEYKVPSKKFKVLGNTDRHSIKKNLIGAL
LFDSGETAEATRLKRTARRRYTRRKNRICYLQEIFSNEMAKVDDSFFHRLEESFLVEEDKKH
ERHPIFGNIVDEVAYHEKYPTIYHLRKKLVDSTDKADLRLIYLALAHMIKFRGHFLIEGDLN
PDNSDVDKLFIQLVQTYNQLFEENPINASGVDAKAILSARLSKSRRLENLIAQLPGEKKNGL
FGNLIALSLGLTPNFKSNFDLAEDAKLQLSKDTYDDDLDNLLAQIGDQYADLFLAAKNLSDA
ILLSDILRVNTEITKAPLSASMVKRYDEHHQDLTLLKALVRQQLPEKYKEIFFDQSKNGYAG
YIDGGASQEEFYKFIKPILEKMDGTEELLVKLNREDLLRKQRTFDNGIIPHQIHLGELHAIL
RRQGDFYPFLKDNREKIEKILTFRIPYYVGPLARGNSRFAWMTRKSEETITPWNFEEVVDKG
ASAQSFIERMTNFDKNLPNEKVLPKHSLLYEYFTVYNELTKVKYVTEGMRKPAFLSGEQKKA
IVDLLFKTNRKVTVKQLKEDYFKKIECFDSVEISGVEDRFNASLGTYHDLLKIIKDKDFLDN
EENEDILEDIVLTLTLFEDREMIEERLKTYAHLFDDKVMKQLKRLRYTGWGRLSRKLINGIR
DKQSGKTILDFLKSDGFANRNFMQLIHDDSLTFKEDIQKAQVSGQGDSLHEHIANLAGSPAI
KKGILQTVKVVDELVKVMGGHKPENIVIEMARENQTTQKGQKNSRERMKRIEEGIKELGSQI
LKEHPVENTQLQNEKLYLYYLQNGRDMYVDQELDINRLSDYDVDHIVPQSFLKDDSIDNKVL
TRSDKNRGKSDNVPSEEVVKKMKNYWRQLLNAKLITQRKFDNLTKAERGGLSELDKAGFIKR
QLVETRQITKHVAQILDSRMNTKYDENDKLIREVKVITLKSKLVSDFRKDFQFYKVREINNY
HHAHDAYLNAVVGTALIKKYPKLESEFVYGDYKVYDVRKMIAKSEQEIGKATAKYFFYSNIM
NFFKTEITLANGEIRKRPLIETNGETGEIVWDKGRDFATVRKVLSMPQVNIVKKTEVQTGGF
SKESILPKGNSDKLIARKKDWDPKKYGGFLYPTVAYSVLVVAKVEKGKSKKLKSVKELLGIT
IMERSSFEKNPIDFLEAKGYKEVKKDLIIKLPKYSLFELENGRKRMLASAKFLQKGNELALP
SKYVNFLYLASHYEKLKGSPEDNEQKQLFVEQHKHYLDEIIEQISEFSKRVILDDANLDKVL
SAYNKHRDKPIREQAENIIHLFTLTNLGAPRAFKYFDTTIARKEYKSTKEVLDATLIHQSIT
GLYETRIDLSQLGGDEGADKRTADGSEFESPKKKRKV.

### Variant G Amino Acid Sequence:

(SEQ ID NO: 446)
SEVEFSHEYWMRHALTLAKRARDEREVPVGAVLVHNNRVIGEGWNRAIGLHDPTAHAEIMAL
RQGGLVMQNYRLYDATLYTTFEPCVMCAGAMIHSRIGRVVFGVRNAKTGAAGSLMDVLHYPG
MNHRVEITEGILADECAALLCTFFRMPRSVFKAQKKAQSSTDSGGSSGGSSGSETPGTSESA
TPESSGGSSGGSDKKYSIGLAIGTNSVGWAVITDEYKVPSKKFKVLGNTDRHSIKKNLIGAL
LFDSGETAEATRLKRTARRRYTRRKNRICYLQEIFSNEMAKVDDSFFHRLEESFLVEEDKKH
ERHPIFGNIVDEVAYHEKYPTIYHLRKKLVDSTDKADLRLIYLALAHMIKFRGHFLIEGDLN
PDNSDVDKLFIQLVQTYNQLFEENPINASGVDAKAILSARLSKSRRLENLIAQLPGEKKNGL
FGNLIALSLGLTPNFKSNFDLAEDAKLQLSKDTYDDDLDNLLAQIGDQYADLFLAAKNLSDA
ILLSDILRVNTEITKAPLSASMVKRYDEHHQDLTLLKALVRQQLPEKYKEIFFDQSKNGYAG
YIDGGASQEEFYKFIKPILEKMDGTEELLVKLNREDLLRKQRTFDNGIIPHQIHLGELHAIL
RRQGDFYPFLKDNREKIEKILTFRIPYYVGPLARGNSRFAWMTRKSEETITPWNFEEVVDKG
ASAQSFIERMTNFDKNLPNEKVLPKHSLLYEYFTVYNELTKVKYVTEGMRKPAFLSGEQKKA
IVDLLFKTNRKVTVKQLKEDYFKKIECFDSVEISGVEDRFNASLGTYHDLLKIIKDKDFLDN
EENEDILEDIVLTLTLFEDREMIEERLKTYAHLFDDKVMKQLKRLRYTGWGRLSRKLINGIR
DKQSGKTILDFLKSDGFANRNFMQLIHDDSLTFKEDIQKAQVSGQGDSLHEHIANLAGSPAI
KKGILQTVKVVDELVKVMGGHKPENIVIEMARENQTTQKGQKNSRERMKRIEEGIKELGSQI
LKEHPVENTQLQNEKLYLYYLQNGRDMYVDQELDINRLSDYDVDHIVPQSFLKDDSIDNKVL
TRSDKNRGKSDNVPSEEVVKKMKNYWRQLLNAKLITQRKFDNLTKAERGGLSELDKAGFIKR
QLVETRQITKHVAQILDSRMNTKYDENDKLIREVKVITLKSKLVSDFRKDFQFYKVREINNY
HHAHDAYLNAVVGTALIKKYPKLESEFVYGDYKVYDVRKMIAKSEQEIGKATAKYFFYSNIM
NFFKTEITLANGEIRKRPLIETNGETGEIVWDKGRDFATVRKVLSMPQVNIVKKTEVQTGGF
SKESILPKGNSDKLIARKKDWDPKKYGGFLQPTVAYSVLVVAKVEKGKSKKLKSVKELLGIT
IMERSSFEKNPIDFLEAKGYKEVKKDLIIKLPKYSLFELENGRKRMLASAKFLQKGNELALP
SKYVNFLYLASHYEKLKGSPKDNEQKQLFVEQHKHYLDEIIEQISEFSKRVILDDANLDKVL
SAYNKHRDKPIREQAENIIHLFTLTNLGAPRAFKYFDTTIARKEYKSTKEVLDATLIHQSIT
GLYETRIDLSQLGGDEGADKRTADGSEFESPKKKRKV.

### Variant H Amino Acid Sequence:

(SEQ ID NO: 447)
SEVEFSHEYWMRHALTLAKRARDEREVPVGAVLVHNNRVIGEGWNRAIGLHDPTAHAEIMAL
RQGGLVMQNYRLYDATLYTTFEPCVMCAGAMIHSRIGRVVFGVRNAKTGAAGSLMDVLHYPG
MNHRVEITEGILADECAALLCTFFRMPRSVFKAQKKAQSSTDSGGSSGGSSGSETPGTSESA
TPESSGGSSGGSDKKYSIGLAIGTNSVGWAVITDEYKVPSKKFKVLGNTDRHSIKKNLIGAL
LFDSGETAEATRLKRTARRRYTRRKNRICYLQEIFSNEMAKVDDSFFHRLEESFLVEEDKKH
ERHPIFGNIVDEVAYHEKYPTIYHLRKKLVDSTDKADLRLIYLALAHMIKFRGHFLIEGDLN
PDNSDVDKLFIQLVQTYNQLFEENPINASGVDAKAILSARLSKSRRLENLIAQLPGEKKNGL
FGNLIALSLGLTPNFKSNFDLAEDAKLQLSKDTYDDDLDNLLAQIGDQYADLFLAAKNLSDA
ILLSDILRVNTEITKAPLSASMVKRYDEHHQDLTLLKALVRQQLPEKYKEIFFDQSKNGYAG
YIDGGASQEEFYKFIKPILEKMDGTEELLVKLNREDLLRKQRTFDNGIIPHQIHLGELHAIL
RRQGDFYPFLKDNREKIEKILTFRIPYYVGPLARGNSRFAWMTRKSEETITPWNFEEVVDKG
ASAQSFIERMTNFDKNLPNEKVLPKHSLLYEYFTVYNELTKVKYVTEGMRKPAFLSGEQKKA
IVDLLFKTNRKVTVKQLKEDYFKKIECFDSVEISGVEDRFNASLGTYHDLLKIIKDKDFLDN
EENEDILEDIVLTLTLFEDREMIEERLKTYAHLFDDKVMKQLKRLRYTGWGRLSRKLINGIR
DKQSGKTILDFLKSDGFANRNFMQLIHDDSLTFKEDIQKAQVSGQGDSLHEHIANLAGSPAI
KKGILQTVKVVDELVKVMGGHKPENIVIEMARENQTTQKGQKNSRERMKRIEEGIKELGSQI
LKEHPVENTQLQNEKLYLYYLQNGRDMYVDQELDINRLSDYDVDHIVPQSFLKDDSIDNKVL
TRSDKNRGKSDNVPSEEVVKKMKNYWRQLLNAKLITQRKFDNLTKAERGGLSELDKAGFIKR
QLVETRQITKHVAQILDSRMNTKYDENDKLIREVKVITLKSKLVSDFRKDFQFYKVREINNY
HHAHDAYLNAVVGTALIKKYPKLESEFVYGDYKVYDVRKMIAKSEQEIGKATAKYFFYSNIM
NFFKTEITLANGEIRKRPLIETNGETGEIVWDKGRDFATVRKVLSMPQVNIVKKTEVQTGGF
SKESILPKGNSDKLIARKKDWDPKKYGGFMYPTVAYSVLVVAKVEKGKSKKLKSVKELLGIT
IMERSSFEKNPIDFLEAKGYKEVKKDLIIKLPKYSLFELENGRKRMLASAKFLQKGNELALP
SKYVNFLYLASHYEKLKGSPKDNEQKQLFVEQHKHYLDEIIEQISEFSKRVILDDANLDKVL
SAYNKHRDKPIREQAENIIHLFTLTNLGAPRAFKYFDTTIARKEYRSTKEVLDATLIHQSIT
GLYETRIDLSQLGGDEGADKRTADGSEFESPKKKRKV.

### Variant I Amino Acid Sequence:

(SEQ ID NO: 448)
SEVEFSHEYWMRHALTLAKRARDEREVPVGAVLVHNNRVIGEGWNRAIGLHDPTAHAEIMAL
RQGGLVMQNYRLYDATLYTTFEPCVMCAGAMIHSRIGRVVFGVRNAKTGAAGSLMDVLHYPG
MNHRVEITEGILADECAALLCTFFRMPRSVFKAQKKAQSSTDKGPKPKKEESEKDKKYSIGL
AIGTNSVGWAVITDEYKVPSKKFKVLGNTDRHSIKKNLIGALLFDSGETAEATRLKRTARRR
YTRRKNRICYLQEIFSNEMAKVDDSFFHRLEESFLVEEDKKHERHPIFGNIVDEVAYHEKYP
TIYHLRKKLVDSTDKADLRLIYLALAHMIKFRGHFLIEGDLNPDNSDVDKLFIQLVQTYNQL
FEENPINASGVDAKAILSARLSKSRRLENLIAQLPGEKKNGLFGNLIALSLGLTPNFKSNFD
LAEDAKLQLSKDTYDDDLDNLLAQIGDQYADLFLAAKNLSDAILLSDILRVNTEITKAPLSA
SMVKRYDEHHQDLTLLKALVRQQLPEKYKEIFFDQSKNGYAGYIDGGASQEEFYKFIKPILE
KMDGTEELLVKLNREDLLRKQRTFDNGIIPHQIHLGELHAILRRQGDFYPFLKDNREKIEKI
LTFRIPYYVGPLARGNSRFAWMTRKSEETITPWNFEEVVDKGASAQSFIERMTNFDKNLPNE
KVLPKHSLLYEYFTVYNELTKVKYVTEGMRKPAFLSGEQKKAIVDLLFKTNRKVTVKQLKED
YFKKIECFDSVEISGVEDRFNASLGTYHDLLKIIKDKDFLDNEENEDILEDIVLTLTLFEDR
EMIEERLKTYAHLFDDKVMKQLKRLRYTGWGRLSRKLINGIRDKQSGKTILDFLKSDGFANR
NFMQLIHDDSLTFKEDIQKAQVSGQGDSLHEHIANLAGSPAIKKGILQTVKVVDELVKVMGG
HKPENIVIEMARENQTTQKGQKNSRERMKRIEEGIKELGSQILKEHPVENTQLQNEKLYLYY
LQNGRDMYVDQELDINRLSDYDVDHIVPQSFLKDDSIDNKVLTRSDKNRGKSDNVPSEEVVK
KMKNYWRQLLNAKLITQRKFDNLTKAERGGLSELDKAGFIKRQLVETRQITKHVAQILDSRM
NTKYDENDKLIREVKVITLKSKLVSDFRKDFQFYKVREINNYHHAHDAYLNAVVGTALIKKY
PKLESEFVYGDYKVYDVRKMIAKSEQEIGKATAKYFFYSNIMNFFKTEITLANGEIRKRPLI
ETNGETGEIVWDKGRDFATVRKVLSMPQVNIVKKTEVQTGGFSKESILPKGNSDKLIARKKD
WDPKKYGGFLYPTVAYSVLVVAKVEKGKSKKLKSVKELLGITIMERSSFEKNPIDFLEAKGY
KEVKKDLIIKLPKYSLFELENGRKRMLASAKFLQKGNELALPSKYVNFLYLASHYEKLKGSP
EDNEQKQLFVEQHKHYLDEIIEQISEFSKRVILDDANLDKVLSAYNKHRDKPIREQAENIIH
LFTLTNLGAPRAFKYFDTTIARKEYKSTKEVLDATLIHQSITGLYETRIDLSQLGGDEGADK
RTADGSEFESPKKKRKV.

### Variant J Amino Acid Sequence:

(SEQ ID NO: 449)
SEVEFSHEYWMRHALTLAKRARDEREVPVGAVLVHNNRVIGEGWNRAIGLHDPTAHAEIMAL
RQGGLVMQNYRLYDATLYTTFEPCVMCAGAMIHSRIGRVVFGVRNAKTGAAGSLMDVLHYPG
MNHRVEITEGILADECAALLCTFFRMPRSVFKAQKKAQSSTDSGGSSGGSSGSETPGTSESA
TPESSGGSSGGSDKKYSIGLAIGTNSVGWAVITDEYKVPSKKFKVLGNTDRHSIKKNLIGAL
LFDSGETAEATRLKRTARRRYTRRKNRICYLQEIFSNEMAKVDDSFFHRLEESFLVEEDKKH
ERHPIFGNIVDEVAYHEKYPTIYHLRKKLVDSTDKADLRLIYLALAHMIKFRGHFLIEGDLN
PDNSDVDKLFIQLVQTYNQLFEENPINASGVDAKAILSARLSKSRRLENLIAQLPGEKKNGL
FGNLIALSLGLTPNFKSNFDLAEDAKLQLSKDTYDDDLDNLLAQIGDQYADLFLAAKNLSDA
ILLSDILRVNTEITKAPLSASMVKRYDEHHQDLTLLKALVRQQLPEKYKEIFFDQSKNGYAG
YIDGGASQEEFYKFIKPILEKMDGTEELLVKLNREDLLRKQRTFDNGIIPHQIHLGELHAIL
RRQGDFYPFLKDNREKIEKILTFRIPYYVGPLARGNSRFAWMTRKSEETITPWNFEEVVDKG
ASAQSFIERMTNFDKNLPNEKVLPKHSLLYEYFTVYNELTKVKYVTEGMRKPAFLSGEQKKA
IVDLLFKTNRKVTVKQLKEDYFKKIECFDSVEISGVEDRFNASLGTYHDLLKIIKDKDFLDN
EENEDILEDIVLTLTLFEDREMIEERLKTYAHLFDDKVMKQLKRLRYTGWGRLSRKLINGIR
DKQSGKTILDFLKSDGFANRNFMQLIHDDSLTFKEDIQKAQVSGQGDSLHEHIANLAGSPAI
KKGILQTVKVVDELVKVMGGHKPENIVIEMAAENATTQKGQKNSRERMKRIEEGIKELGSQI
LKEHPVENTQLQNEKLYLYYLQNGRDMYVDQELDINRLSDYDVDHIVPQSFLKDDSIDNKVL
TRSDKNRGKSDNVPSEEVVKKMKNYWRQLLNAKLITQRKFDNLTKAERGGLSELDKAGFIKR
QLVETRQITKHVAQILDSRMNTKYDENDKLIREVKVITLKSKLVSDFRKDFQFYKVREINNY
HHAHDAYLNAVVGTALIKKYPKLESEFVYGDYKVYDVRKMIAKSEQEIGKATAKYFFYSNIM
NFFKTEITLANGEIRKRPLIETNGETGEIVWDKGRDFATVRKVLSMPQVNIVKKTEVQTGGF
SKESILPKGNSDKLIARKKDWDPKKYGGFLYPTVAYSVLVVAKVEKGKSKKLKSVKELLGIT
IMERSSFEKNPIDFLEAKGYKEVKKDLIIKLPKYSLFELENGRKRMLASAKFLQKGNELALP
SKYVNFLYLASHYEKLKGSPEDNEQKQLFVEQHKHYLDEIIEQISEFSKRVILDDANLDKVL
SAYNKHRDKPIREQAENIIHLFTLTNLGAPRAFKYFDTTIARKEYKSTKEVLDATLIHQSIT
GLYETRIDLSQLGGDEGADKRTADGSEFESPKKKRKV.

### Variant K Amino Acid Sequence:

(SEQ ID NO: 450)
SEVEFSHEYWMRHALTLAKRARDEREVPVGAVLVHNNRVIGEGWNRAIGLHDPTAHAEIMAL
RQGGLVMQNYRLYDATLYTTFEPCVMCAGAMIHSRIGRVVFGVRNAKTGAAGSLMDVLHYPG
MNHRVEITEGILADECAALLCTFFRMPRSVFKAQKKAQSSTDKGPKPKKEESEKDKKYSIGL
AIGTNSVGWAVITDEYKVPSKKFKVLGNTDRHSIKKNLIGALLFDSGETAEATRLKRTARRR
YTRRKNRICYLQEIFSNEMAKVDDSFFHRLEESFLVEEDKKHERHPIFGNIVDEVAYHEKYP
TIYHLRKKLVDSTDKADLRLIYLALAHMIKFRGHFLIEGDLNPDNSDVDKLFIQLVQTYNQL
FEENPINASGVDAKAILSARLSKSRRLENLIAQLPGEKKNGLFGNLIALSLGLTPNFKSNFD
LAEDAKLQLSKDTYDDDLDNLLAQIGDQYADLFLAAKNLSDAILLSDILRVNTEITKAPLSA
SMVKRYDEHHQDLTLLKALVRQQLPEKYKEIFFDQSKNGYAGYIDGGASQEEFYKFIKPILE
KMDGTEELLVKLNREDLLRKQRTFDNGIIPHQIHLGELHAILRRQGDFYPFLKDNREKIEKI
LTFRIPYYVGPLARGNSRFAWMTRKSEETITPWNFEEVVDKGASAQSFIERMTNFDKNLPNE
KVLPKHSLLYEYFTVYNELTKVKYVTEGMRKPAFLSGEQKKAIVDLLFKTNRKVTVKQLKED
YFKKIECFDSVEISGVEDRFNASLGTYHDLLKIIKDKDFLDNEENEDILEDIVLTLTLFEDR
EMIEERLKTYAHLFDDKVMKQLKRLRYTGWGRLSRKLINGIRDKQSGKTILDFLKSDGFANR
NFMQLIHDDSLTFKEDIQKAQVSGQGDSLHEHIANLAGSPAIKKGILQTVKVVDELVKVMGG
HKPENIVIEMARENQTTQKGQKNSRERMKRIEEGIKELGSQILKEHPVENTQLQNEKLYLYY
LQNGRDMYVDQELDINRLSDYDVDHIVPQSFLKDDSIDNKVLTRSDKNRGKSDNVPSEEVVK
KMKNYWRQLLNAKLITQRKFDNLTKAERGGLSELDKAGFIKRQLVETRQITKHVAQILDSRM
NTKYDENDKLIREVKVITLKSKLVSDFRKDFQFYKVREINNYHHAHDAYLNAVVGTALIKKY
PKLESEFVYGDYKVYDVRKMIAKSEQEIGKATAKYFFYSNIMNFFKTEITLANGEIRKRPLI
ETNGETGEIVWDKGRDFATVRKVLSMPQVNIVKKTEVQTGGFSKESILPKGNSDKLIARKKD
WDPKKYGGFMYPTVAYSVLVVAKVEKGKSKKLKSVKELLGITIMERSSFEKNPIDFLEAKGY
KEVKKDLIIKLPKYSLFELENGRKRMLASAKFLQKGNELALPSKYVNFLYLASHYEKLKGSP
KDNEQKQLFVEQHKHYLDEIIEQISEFSKRVILDDANLDKVLSAYNKHRDKPIREQAENIIH
LFTLTNLGAPRAFKYFDTTIARKEYRSTKEVLDATLIHQSITGLYETRIDLSQLGGDEGADK
RTADGSEFESPKKKRKV.

[0221] Exemplary polynucleotide sequences for Variants A-K are provided below.

### Variant A Polynucleotide Sequence:

(SEQ ID NO: 451)
TCAGAAGTCGAGTTTAGCCACGAATATTGGATGCGCCACGCCCTCACCCTGGCCAAGAGAGC
CCGGGACGAGCGCGAGGTGCCCGTGGGCGCCGTCCTGGTGCACAACAACAGGGTGATCGGCG
AGGGCTGGAACCGGGCCATCGGCCTGCACGACCCCACAGCCCACGCCGAGATCATGGCCCTG
CGGCAGGGTGGCCTGGTCATGCAGAACTACAGGCTGTATGACGCCACCCTGTACACCACATT
CGAGCCCTGCGTGATGTGCGCCGGGGCCATGATCCACAGCCGGATCGGCCGCGTGGTGTTCG
GCGTGCGGAACGCCAAGACCGGCGCCGCCGGCAGCCTGATGGACGTTCTGCACTACCCCGGG
ATGAACCACAGGGTGGAGATCACAGAGGGCATCCTGGCAGACGAGTGCGCCGCCCTGCTGTG
CACTTTCTTCAGGATGCCCAGATCTGTGTTCAAGGCCCAGAAGAAGGCCCAGAGCTCCACCG
ACAGCGGCGGGAGCTCTGGGGGCTCCTCCGGGAGCGAGACCCCCGGGACCAGCGAGTCCGCC
ACCCCCGAGAGCAGCGGCGGCAGCTCCGGGGGGAGCGACAAGAAGTACTCCATCGGCCTGGC
CATCGGCACCAACTCCGTGGGTTGGGCCGTGATCACCGATGAGTACAAGGTGCCCAGCAAGA
AGTTCAAGGTGCTGGGCAACACCGACAGGCACTCTATCAAGAAGAACCTGATCGGCGCCCTG
CTGTTCGACAGCGGGGAGACCGCTGAGGCCACTCGGCTGAAGAGAACCGCCAGGCGCAGATA
CACCCGGAGAAAGAACCGGATCTGCTACCTGCAGGAGATCTTCAGCAACGAGATGGCCAAGG
TGGACGACAGCTTCTTCCACAGGCTGGAGGAGAGCTTCCTGGTGGAGGAGGACAAGAAGCAC
GAGCGCCACCCCATCTTCGGCAACATCGTGGATGAGGTGGCCTACCACGAGAAGTACCCCAC
CATCTACCACCTGCGGAAGAAGCTGGTGGACAGCACCGATAAGGCCGATCTGCGGCTGATCT
ACCTGGCCCTGGCCCACATGATCAAGTTCAGGGGGCACTTCCTGATCGAGGGCGACCTGAAC
CCCGACAACTCCGATGTGGATAAACTGTTCATCCAGCTGGTGCAGACCTACAACCAGCTGTT
TGAGGAGAATCCCATCAACGCCTCCGGCGTGGACGCCAAGGCCATCCTGAGCGCCCGGCTGT
CCAAGAGCCGGAGGCTGGAGAATCTGATCGCCCAGCTGCCTGGCGAGAAGAAGAACGGCCTG
TTCGGCAACCTGATCGCCCTGAGCCTGGGCCTGACCCCCAATTTCAAGAGCAACTTCGACCT
GGCCGAGGATGCTAAGCTGCAGCTGTCCAAGGACACCTACGACGATGACCTGGACAACCTGC
TGGCTCAGATCGGCGATCAGTACGCCGACCTGTTCCTGGCCGCCAAGAACCTGTCAGACGCC
ATCCTGCTGTCTGACATTCTGCGGGTGAACACCGAGATCACCAAGGCCCCACTGTCCGCCTC
TATGGTGAAGAGGTACGATGAGCACCACCAGGACCTGACCCTGCTGAAGGCTCTGGTGCGGC
AGCAGCTGCCGGAGAAGTACAAGGAGATCTTCTTCGACCAGAGCAAGAACGGCTACGCCGGC
TACATCGACGGCGGGGCCAGCCAGGAGGAGTTCTACAAGTTCATCAAGCCTATCCTGGAGAA
GATGGACGGCACCGAGGAGCTGCTGGTGAAGCTGAACCGGGAGGACCTGCTGCGGAAGCAGA
GGACCTTCGACAACGGCATCATTCCCCACCAGATCCACCTGGGCGAGCTGCACGCCATCCTG
CGGAGGCAGGGCGACTTCTACCCTTTCCTGAAGGACAACAGGGAGAAGATCGAGAAGATCCT
GACCTTCAGGATCCCCTACTACGTGGGCCCCCTGGCCCGCGGCAACTCCCGCTTTGCCTGGA
TGACCAGAAAGAGCGAGGAGACCATCACCCCTTGGAACTTCGAGGAGGTGGTGGACAAGGGC
GCCAGCGCCCAGAGCTTCATCGAGCGCATGACCAACTTCGACAAGAATCTGCCCAACGAGAA
GGTGCTGCCCAAGCACTCCCTGCTGTACGAGTACTTCACCGTGTACAACGAGCTGACAAAGG
TGAAGTACGTGACAGAGGGCATGCGCAAGCCCGCCTTCCTGTCTGGCGAGCAGAAGAAGGCC
ATCGTGGACCTGCTGTTCAAGACCAACAGGAAGGTGACCGTGAAGCAGCTGAAGGAGGACTA
CTTCAAGAAGATCGAGTGCTTCGACAGCGTGGAGATCAGCGGCGTGGAGGACAGGTTCAACG
CCAGCCTGGGCACCTACCACGACCTGCTGAAGATCATCAAGGACAAGGACTTCCTGGATAAC
GAGGAGAACGAGGATATCCTGGAGGACATTGTCCTGACCCTGACCCTGTTCGAGGATCGGGA
GATGATCGAGGAGCGCCTCAAGACCTACGCCCACCTGTTCGACGATAAGGTGATGAAGCAGC
TGAAGCGGCTGCGCTACACCGGCTGGGGCCGCCTGTCCCGGAAGCTGATCAACGGCATCCGG
GACAAGCAGTCCGGCAAGACCATCCTGGACTTCCTGAAGTCCGATGGTTTTGCCAACAGAAA
CTTCATGCAGCTGATCCACGACGACAGCCTGACCTTCAAGGAGGACATCCAGAAGGCTCAGG
TGTCCGGACAGGGGGACTCCCTGCACGAGCACATCGCCAACCTGGCCGGCTCTCCCGCCATC
AAGAAGGGCATCCTGCAGACCGTGAAGGTGGTGGACGAGCTGGTGAAGGTGATGGGCGGGCA
CAAGCCCGAGAACATCGTGATCGAGATGGCCCGGGAGAACCAGACCACCCAGAAGGGCCAGA
AGAACAGCAGGGAGCGCATGAAGCGCATCGAGGAGGGCATCAAGGAGCTGGGTAGCCAGATC
CTGAAGGAGCACCCTGTGGAGAATACCCAGCTGCAGAACGAGAAGCTGTATCTGTACTACCT
GCAGAACGGCAGGGACATGTACGTGGATCAGGAGCTGGACATCAACCGGCTGTCTGACTACG
ACGTGGACCACATCGTGCCCCAGTCTTTCCTGAAGGACGACAGCATCGACAACAAGGTGCTG
ACCCGCAGCGACAAGAACAGGGGCAAGAGCGATAACGTGCCCTCCGAGGAGGTGGTCAAGAA
GATGAAGAACTACTGGCGGCAGCTGCTGAACGCCAAGCTGATCACCCAGCGGAAGTTCGACA
ACCTGACCAAGGCCGAGAGAGGCGGCCTGTCCGAGCTGGACAAGGCCGGCTTCATCAAGCGG
CAGCTGGTGGAGACCCGGCAGATCACCAAGCACGTCGCCCAGATCCTGGACTCCAGGATGAA
CACCAAGTACGACGAGAACGACAAGCTGATCAGAGAGGTGAAGGTGATCACCCTGAAGTCCA
AGCTGGTGAGCGACTTCAGGAAGGATTTCCAGTTCTACAAGGTGCGGGAGATCAACAACTAT
CACCACGCCCACGACGCCTACCTGAACGCCGTCGTGGGCACCGCTCTGATCAAGAAGTATCC
TAAGCTGGAGAGCGAGTTCGTGTACGGCGACTACAAGGTGTACGACGTGCGGAAGATGATCG
CCAAGAGCGAGCAGGAGATCGGCAAGGCCACCGCCAAGTACTTCTTCTACTCCAATATCATG
AACTTCTTCAAGACCGAGATCACCCTGGCCAACGGGGAGATCCGGAAGCGCCCACTGATCGA
GACCAACGGCGAGACCGGCGAGATCGTGTGGGACAAGGGCAGGGACTTCGCCACCGTGAGGA
AGGTGCTGTCCATGCCCCAGGTGAACATCGTGAAAAAGACCGAGGTGCAGACCGGGGGGTTC
TCCAAGGAGAGCATCCTGCCCAAGGGCAACAGCGACAAGCTGATCGCCCGGAAGAAGGACTG
GGACCCCAAGAAGTACGGAGGCTTCATGCAGCCTACCGTGGCCTACTCCGTGCTGGTGGTGG
CCAAGGTGGAGAAGGGCAAGTCCAAGAAGCTGAAGTCAGTGAAGGAGCTGCTGGGCATCACC
ATCATGGAGCGGTCTAGCTTCGAGAAGAATCCTATTGACTTCCTGGAGGCCAAGGGCTACAA
GGAGGTCAAGAAGGATCTGATCATCAAGCTGCCCAAGTACAGCCTGTTCGAGCTGGAGAATG
GCCGGAAGAGGATGCTGGCCAGCGCCAAGTTCCTGCAGAAGGGCAACGAGCTGGCCCTGCCC
AGCAAGTACGTGAACTTCCTCTATCTGGCCAGCCACTACGAGAAGCTGAAGGGCTCTCCAGA
GGACAACGAGCAGAAGCAGCTGTTCGTGGAGCAGCACAAGCACTACCTGGACGAGATCATCG
AGCAGATCTCCGAGTTCAGCAAGCGCGTGATCCTGGCCGACGCCAACCTGGACAAGGTGCTG
TCCGCTTACAACAAGCACAGGGACAAGCCCATCAGGGAGCAGGCCGAGAACATCATCCACCT
GTTCACCCTGACCAACCTGGGCGCCCCCAGGGCCTTCAAGTACTTCGATACCACCATCGCCA
GGAAGGAGTACAaAAGTACTAAGGAGGTCCTGGATGCCACTCTGATCCACCAGAGCATCACC
GGGCTGTACGAGACCCGGATCGACCTGTCCCAGCTGGGCGGCGACGAGGGCGCCGACAAGCG
GACAGCCGACGGCAGCGAGTTCGAGAGCCCCAAGAAGAAGCGGAAGGTG

### Variant B Polynucleotide Sequence:

(SEQ ID NO: 452)
TCAGAAGTCGAGTTTAGCCACGAATATTGGATGCGCCACGCCCTCACCCTGGCCAAGAGAGC
CCGGGACGAGCGCGAGGTGCCCGTGGGCGCCGTCCTGGTGCACAACAACAGGGTGATCGGCG
AGGGCTGGAACCGGGCCATCGGCCTGCACGACCCCACAGCCCACGCCGAGATCATGGCCCTG
CGGCAGGGTGGCCTGGTCATGCAGAACTACAGGCTGTATGACGCCACCCTGTACACCACATT
CGAGCCCTGCGTGATGTGCGCCGGGGCCATGATCCACAGCCGGATCGGCCGCGTGGTGTTCG
GCGTGCGGAACGCCAAGACCGGCGCCGCCGGCAGCCTGATGGACGTTCTGCACTACCCCGGG
ATGAACCACAGGGTGGAGATCACAGAGGGCATCCTGGCAGACGAGTGCGCCGCCCTGCTGTG
CACTTTCTTCAGGATGCCCAGATCTGTGTTCAAGGCCCAGAAGAAGGCCCAGAGCTCCACCG
ACAGCGGCGGGAGCTCTGGGGGCTCCTCCGGGAGCGAGACCCCCGGGACCAGCGAGTCCGCC
ACCCCCGAGAGCAGCGGCGGCAGCTCCGGGGGGAGCGACAAGAAGTACTCCATCGGCCTGGC
CATCGGCACCAACTCCGTGGGTTGGGCCGTGATCACCGATGAGTACAAGGTGCCCAGCAAGA
AGTTCAAGGTGCTGGGCAACACCGACAGGCACTCTATCAAGAAGAACCTGATCGGCGCCCTG
CTGTTCGACAGCGGGGAGACCGCTGAGGCCACTCGGCTGAAGAGAACCGCCAGGCGCAGATA
CACCCGGAGAAAGAACCGGATCTGCTACCTGCAGGAGATCTTCAGCAACGAGATGGCCAAGG
TGGACGACAGCTTCTTCCACAGGCTGGAGGAGAGCTTCCTGGTGGAGGAGGACAAGAAGCAC
GAGCGCCACCCCATCTTCGGCAACATCGTGGATGAGGTGGCCTACCACGAGAAGTACCCCAC
CATCTACCACCTGCGGAAGAAGCTGGTGGACAGCACCGATAAGGCCGATCTGCGGCTGATCT
ACCTGGCCCTGGCCCACATGATCAAGTTCAGGGGGCACTTCCTGATCGAGGGCGACCTGAAC
CCCGACAACTCCGATGTGGATAAACTGTTCATCCAGCTGGTGCAGACCTACAACCAGCTGTT
TGAGGAGAATCCCATCAACGCCTCCGGCGTGGACGCCAAGGCCATCCTGAGCGCCCGGCTGT
CCAAGAGCCGGAGGCTGGAGAATCTGATCGCCCAGCTGCCTGGCGAGAAGAAGAACGGCCTG
TTCGGCAACCTGATCGCCCTGAGCCTGGGCCTGACCCCCAATTTCAAGAGCAACTTCGACCT
GGCCGAGGATGCTAAGCTGCAGCTGTCCAAGGACACCTACGACGATGACCTGGACAACCTGC
TGGCTCAGATCGGCGATCAGTACGCCGACCTGTTCCTGGCCGCCAAGAACCTGTCAGACGCC
ATCCTGCTGTCTGACATTCTGCGGGTGAACACCGAGATCACCAAGGCCCCACTGTCCGCCTC
TATGGTGAAGAGGTACGATGAGCACCACCAGGACCTGACCCTGCTGAAGGCTCTGGTGCGGC
AGCAGCTGCCGGAGAAGTACAAGGAGATCTTCTTCGACCAGAGCAAGAACGGCTACGCCGGC
TACATCGACGGCGGGGCCAGCCAGGAGGAGTTCTACAAGTTCATCAAGCCTATCCTGGAGAA
GATGGACGGCACCGAGGAGCTGCTGGTGAAGCTGAACCGGGAGGACCTGCTGCGGAAGCAGA
GGACCTTCGACAACGGCATCATTCCCCACCAGATCCACCTGGGCGAGCTGCACGCCATCCTG
CGGAGGCAGGGCGACTTCTACCCTTTCCTGAAGGACAACAGGGAGAAGATCGAGAAGATCCT
GACCTTCAGGATCCCCTACTACGTGGGCCCCCTGGCCCGCGGCAACTCCCGCTTTGCCTGGA
TGACCAGAAAGAGCGAGGAGACCATCACCCCTTGGAACTTCGAGGAGGTGGTGGACAAGGGC
GCCAGCGCCCAGAGCTTCATCGAGCGCATGACCAACTTCGACAAGAATCTGCCCAACGAGAA
GGTGCTGCCCAAGCACTCCCTGCTGTACGAGTACTTCACCGTGTACAACGAGCTGACAAAGG
TGAAGTACGTGACAGAGGGCATGCGCAAGCCCGCCTTCCTGTCTGGCGAGCAGAAGAAGGCC
ATCGTGGACCTGCTGTTCAAGACCAACAGGAAGGTGACCGTGAAGCAGCTGAAGGAGGACTA
CTTCAAGAAGATCGAGTGCTTCGACAGCGTGGAGATCAGCGGCGTGGAGGACAGGTTCAACG
CCAGCCTGGGCACCTACCACGACCTGCTGAAGATCATCAAGGACAAGGACTTCCTGGATAAC
GAGGAGAACGAGGATATCCTGGAGGACATTGTCCTGACCCTGACCCTGTTCGAGGATCGGGA
GATGATCGAGGAGCGCCTCAAGACCTACGCCCACCTGTTCGACGATAAGGTGATGAAGCAGC
TGAAGCGGCTGCGCTACACCGGCTGGGGCCGCCTGTCCCGGAAGCTGATCAACGGCATCCGG
GACAAGCAGTCCGGCAAGACCATCCTGGACTTCCTGAAGTCCGATGGTTTTGCCAACAGAAA
CTTCATGCAGCTGATCCACGACGACAGCCTGACCTTCAAGGAGGACATCCAGAAGGCTCAGG
TGTCCGGACAGGGGGACTCCCTGCACGAGCACATCGCCAACCTGGCCGGCTCTCCCGCCATC
AAGAAGGGCATCCTGCAGACCGTGAAGGTGGTGGACGAGCTGGTGAAGGTGATGGGCGGGCA
CAAGCCCGAGAACATCGTGATCGAGATGGCCCGGGAGAACCAGACCACCCAGAAGGGCCAGA
AGAACAGCAGGGAGCGCATGAAGCGCATCGAGGAGGGCATCAAGGAGCTGGGTAGCCAGATC
CTGAAGGAGCACCCTGTGGAGAATACCCAGCTGCAGAACGAGAAGCTGTATCTGTACTACCT
GCAGAACGGCAGGGACATGTACGTGGATCAGGAGCTGGACATCAACCGGCTGTCTGACTACG
ACGTGGACCACATCGTGCCCCAGTCTTTCCTGAAGGACGACAGCATCGACAACAAGGTGCTG
ACCCGCAGCGACAAGAACAGGGGCAAGAGCGATAACGTGCCCTCCGAGGAGGTGGTCAAGAA
GATGAAGAACTACTGGCGGCAGCTGCTGAACGCCAAGCTGATCACCCAGCGGAAGTTCGACA
ACCTGACCAAGGCCGAGAGAGGCGGCCTGTCCGAGCTGGACAAGGCCGGCTTCATCAAGCGG
CAGCTGGTGGAGACCCGGCAGATCACCAAGCACGTCGCCCAGATCCTGGACTCCAGGATGAA
CACCAAGTACGACGAGAACGACAAGCTGATCAGAGAGGTGAAGGTGATCACCCTGAAGTCCA
AGCTGGTGAGCGACTTCAGGAAGGATTTCCAGTTCTACAAGGTGCGGGAGATCAACAACTAT
CACCACGCCCACGACGCCTACCTGAACGCCGTCGTGGGCACCGCTCTGATCAAGAAGTATCC
TAAGCTGGAGAGCGAGTTCGTGTACGGCGACTACAAGGTGTACGACGTGCGGAAGATGATCG
CCAAGAGCGAGCAGGAGATCGGCAAGGCCACCGCCAAGTACTTCTTCTACTCCAATATCATG
AACTTCTTCAAGACCGAGATCACCCTGGCCAACGGGGAGATCCGGAAGCGCCCACTGATCGA
GACCAACGGCGAGACCGGCGAGATCGTGTGGGACAAGGGCAGGGACTTCGCCACCGTGAGGA
AGGTGCTGTCCATGCCCCAGGTGAACATCGTGAAAAAGACCGAGGTGCAGACCGGGGGGTTC
TCCAAGGAGAGCATCCTGCCCAAGGGCAACAGCGACAAGCTGATCGCCCGGAAGAAGGACTG
GGACCCCAAGAAGTACGGAGGCTTCATGtAtCCTACCGTGGCCTACTCCGTGCTGGTGGTGG
CCAAGGTGGAGAAGGGCAAGTCCAAGAAGCTGAAGTCAGTGAAGGAGCTGCTGGGCATCACC
ATCATGGAGCGGTCTAGCTTCGAGAAGAATCCTATTGACTTCCTGGAGGCCAAGGGCTACAA
GGAGGTCAAGAAGGATCTGATCATCAAGCTGCCCAAGTACAGCCTGTTCGAGCTGGAGAATG
GCCGGAAGAGGATGCTGGCCAGCGCCAAGTTCCTGCAGAAGGGCAACGAGCTGGCCCTGCCC
AGCAAGTACGTGAACTTCCTCTATCTGGCCAGCCACTACGAGAAGCTGAAGGGCTCTCCAGA
GGACAACGAGCAGAAGCAGCTGTTCGTGGAGCAGCACAAGCACTACCTGGACGAGATCATCG
AGCAGATCTCCGAGTTCAGCAAGCGCGTGATCCTGGCCGACGCCAACCTGGACAAGGTGCTG
TCCGCTTACAACAAGCACAGGGACAAGCCCATCAGGGAGCAGGCCGAGAACATCATCCACCT
GTTCACCCTGACCAACCTGGGCGCCCCCAGGGCCTTCAAGTACTTCGATACCACCATCGCCA
GGAAGGAGTACAaAAGTACTAAGGAGGTCCTGGATGCCACTCTGATCCACCAGAGCATCACC
GGGCTGTACGAGACCCGGATCGACCTGTCCCAGCTGGGCGGCGACGAGGGCGCCGACAAGCG
GACAGCCGACGGCAGCGAGTTCGAGAGCCCCAAGAAGAAGCGGAAGGTG

### Variant C Polynucleotide Sequence:

(SEQ ID NO: 453)
TCAGAAGTCGAGTTTAGCCACGAATATTGGATGCGCCACGCCCTCACCCTGGCCAAGAGAGC
CCGGGACGAGCGCGAGGTGCCCGTGGGCGCCGTCCTGGTGCACAACAACAGGGTGATCGGCG
AGGGCTGGAACCGGGCCATCGGCCTGCACGACCCCACAGCCCACGCCGAGATCATGGCCCTG
CGGCAGGGTGGCCTGGTCATGCAGAACTACAGGCTGTATGACGCCACCCTGTACACCACATT
CGAGCCCTGCGTGATGTGCGCCGGGGCCATGATCCACAGCCGGATCGGCCGCGTGGTGTTCG
GCGTGCGGAACGCCAAGACCGGCGCCGCCGGCAGCCTGATGGACGTTCTGCACTACCCCGGG
ATGAACCACAGGGTGGAGATCACAGAGGGCATCCTGGCAGACGAGTGCGCCGCCCTGCTGTG
CACTTTCTTCAGGATGCCCAGATCTGTGTTCAAGGCCCAGAAGAAGGCCCAGAGCTCCACCG
ACGAGGGCGGATCTGAGGAAGAGGAAGAGAGCGGCAGCGACAAGAAGTACTCCATCGGCCTG
GCCATCGGCACCAACTCCGTGGGTTGGGCCGTGATCACCGATGAGTACAAGGTGCCCAGCAA
GAAGTTCAAGGTGCTGGGCAACACCGACAGGCACTCTATCAAGAAGAACCTGATCGGCGCCC
TGCTGTTCGACAGCGGGGAGACCGCTGAGGCCACTCGGCTGAAGAGAACCGCCAGGCGCAGA
TACACCCGGAGAAAGAACCGGATCTGCTACCTGCAGGAGATCTTCAGCAACGAGATGGCCAA
GGTGGACGACAGCTTCTTCCACAGGCTGGAGGAGAGCTTCCTGGTGGAGGAGGACAAGAAGC
ACGAGCGCCACCCCATCTTCGGCAACATCGTGGATGAGGTGGCCTACCACGAGAAGTACCCC
ACCATCTACCACCTGCGGAAGAAGCTGGTGGACAGCACCGATAAGGCCGATCTGCGGCTGAT
CTACCTGGCCCTGGCCCACATGATCAAGTTCAGGGGGCACTTCCTGATCGAGGGCGACCTGA
ACCCCGACAACTCCGATGTGGATAAACTGTTCATCCAGCTGGTGCAGACCTACAACCAGCTG
TTTGAGGAGAATCCCATCAACGCCTCCGGCGTGGACGCCAAGGCCATCCTGAGCGCCCGGCT
GTCCAAGAGCCGGAGGCTGGAGAATCTGATCGCCCAGCTGCCTGGCGAGAAGAAGAACGGCC
TGTTCGGCAACCTGATCGCCCTGAGCCTGGGCCTGACCCCCAATTTCAAGAGCAACTTCGAC
CTGGCCGAGGATGCTAAGCTGCAGCTGTCCAAGGACACCTACGACGATGACCTGGACAACCT
GCTGGCTCAGATCGGCGATCAGTACGCCGACCTGTTCCTGGCCGCCAAGAACCTGTCAGACG
CCATCCTGCTGTCTGACATTCTGCGGGTGAACACCGAGATCACCAAGGCCCCACTGTCCGCC
TCTATGGTGAAGAGGTACGATGAGCACCACCAGGACCTGACCCTGCTGAAGGCTCTGGTGCG
GCAGCAGCTGCCGGAGAAGTACAAGGAGATCTTCTTCGACCAGAGCAAGAACGGCTACGCCG
GCTACATCGACGGCGGGGCCAGCCAGGAGGAGTTCTACAAGTTCATCAAGCCTATCCTGGAG
AAGATGGACGGCACCGAGGAGCTGCTGGTGAAGCTGAACCGGGAGGACCTGCTGCGGAAGCA
GAGGACCTTCGACAACGGCATCATTCCCCACCAGATCCACCTGGGCGAGCTGCACGCCATCC
TGCGGAGGCAGGGCGACTTCTACCCTTTCCTGAAGGACAACAGGGAGAAGATCGAGAAGATC
CTGACCTTCAGGATCCCCTACTACGTGGGCCCCCTGGCCCGCGGCAACTCCCGCTTTGCCTG
GATGACCAGAAAGAGCGAGGAGACCATCACCCCTTGGAACTTCGAGGAGGTGGTGGACAAGG
GCGCCAGCGCCCAGAGCTTCATCGAGCGCATGACCAACTTCGACAAGAATCTGCCCAACGAG
AAGGTGCTGCCCAAGCACTCCCTGCTGTACGAGTACTTCACCGTGTACAACGAGCTGACAAA
GGTGAAGTACGTGACAGAGGGCATGCGCAAGCCCGCCTTCCTGTCTGGCGAGCAGAAGAAGG
CCATCGTGGACCTGCTGTTCAAGACCAACAGGAAGGTGACCGTGAAGCAGCTGAAGGAGGAC
TACTTCAAGAAGATCGAGTGCTTCGACAGCGTGGAGATCAGCGGCGTGGAGGACAGGTTCAA
CGCCAGCCTGGGCACCTACCACGACCTGCTGAAGATCATCAAGGACAAGGACTTCCTGGATA
ACGAGGAGAACGAGGATATCCTGGAGGACATTGTCCTGACCCTGACCCTGTTCGAGGATCGG
GAGATGATCGAGGAGCGCCTCAAGACCTACGCCCACCTGTTCGACGATAAGGTGATGAAGCA
GCTGAAGCGGCTGCGCTACACCGGCTGGGGCCGCCTGTCCCGGAAGCTGATCAACGGCATCC
GGGACAAGCAGTCCGGCAAGACCATCCTGGACTTCCTGAAGTCCGATGGTTTTGCCAACAGA
AACTTCATGCAGCTGATCCACGACGACAGCCTGACCTTCAAGGAGGACATCCAGAAGGCTCA
GGTGTCCGGACAGGGGGACTCCCTGCACGAGCACATCGCCAACCTGGCCGGCTCTCCCGCCA
TCAAGAAGGGCATCCTGCAGACCGTGAAGGTGGTGGACGAGCTGGTGAAGGTGATGGGCGGG
CACAAGCCCGAGAACATCGTGATCGAGATGGCCCGGGAGAACCAGACCACCCAGAAGGGCCA
GAAGAACAGCAGGGAGCGCATGAAGCGCATCGAGGAGGGCATCAAGGAGCTGGGTAGCCAGA
TCCTGAAGGAGCACCCTGTGGAGAATACCCAGCTGCAGAACGAGAAGCTGTATCTGTACTAC
CTGCAGAACGGCAGGGACATGTACGTGGATCAGGAGCTGGACATCAACCGGCTGTCTGACTA
CGACGTGGACCACATCGTGCCCCAGTCTTTCCTGAAGGACGACAGCATCGACAACAAGGTGC
TGACCCGCAGCGACAAGAACAGGGGCAAGAGCGATAACGTGCCCTCCGAGGAGGTGGTCAAG
AAGATGAAGAACTACTGGCGGCAGCTGCTGAACGCCAAGCTGATCACCCAGCGGAAGTTCGA
CAACCTGACCAAGGCCGAGAGAGGCGGCCTGTCCGAGCTGGACAAGGCCGGCTTCATCAAGC
GGCAGCTGGTGGAGACCCGGCAGATCACCAAGCACGTCGCCCAGATCCTGGACTCCAGGATG
AACACCAAGTACGACGAGAACGACAAGCTGATCAGAGAGGTGAAGGTGATCACCCTGAAGTC
CAAGCTGGTGAGCGACTTCAGGAAGGATTTCCAGTTCTACAAGGTGCGGGAGATCAACAACT
ATCACCACGCCCACGACGCCTACCTGAACGCCGTCGTGGGCACCGCTCTGATCAAGAAGTAT
CCTAAGCTGGAGAGCGAGTTCGTGTACGGCGACTACAAGGTGTACGACGTGCGGAAGATGAT
CGCCAAGAGCGAGCAGGAGATCGGCAAGGCCACCGCCAAGTACTTCTTCTACTCCAATATCA
TGAACTTCTTCAAGACCGAGATCACCCTGGCCAACGGGGAGATCCGGAAGCGCCCACTGATC
GAGACCAACGGCGAGACCGGCGAGATCGTGTGGGACAAGGGCAGGGACTTCGCCACCGTGAG
GAAGGTGCTGTCCATGCCCCAGGTGAACATCGTGAAAAAGACCGAGGTGCAGACCGGGGGGT
TCTCCAAGGAGAGCATCCTGCCCAAGGGCAACAGCGACAAGCTGATCGCCCGGAAGAAGGAC
TGGGACCCCAAGAAGTACGGAGGCTTCtTGtAtCCTACCGTGGCCTACTCCGTGCTGGTGGT
GGCCAAGGTGGAGAAGGGCAAGTCCAAGAAGCTGAAGTCAGTGAAGGAGCTGCTGGGCATCA
CCATCATGGAGCGGTCTAGCTTCGAGAAGAATCCTATTGACTTCCTGGAGGCCAAGGGCTAC
AAGGAGGTCAAGAAGGATCTGATCATCAAGCTGCCCAAGTACAGCCTGTTCGAGCTGGAGAA
TGGCCGGAAGAGGATGCTGGCCAGCGCCAAGTTCCTGCAGAAGGGCAACGAGCTGGCCCTGC
CCAGCAAGTACGTGAACTTCCTCTATCTGGCCAGCCACTACGAGAAGCTGAAGGGCTCTCCA
GAGGACAACGAGCAGAAGCAGCTGTTCGTGGAGCAGCACAAGCACTACCTGGACGAGATCAT
CGAGCAGATCTCCGAGTTCAGCAAGCGCGTGATCCTGGCCGACGCCAACCTGGACAAGGTGC
TGTCCGCTTACAACAAGCACAGGGACAAGCCCATCAGGGAGCAGGCCGAGAACATCATCCAC
CTGTTCACCCTGACCAACCTGGGCGCCCCCAGGGCCTTCAAGTACTTCGATACCACCATCGC
CAGGAAGGAGTACAaAAGTACTAAGGAGGTCCTGGATGCCACTCTGATCCACCAGAGCATCA
CCGGGCTGTACGAGACCCGGATCGACCTGTCCCAGCTGGGCGGCGACGAGGGCGCCGACAAG
CGGACAGCCGACGGCAGCGAGTTCGAGAGCCCCAAGAAGAAGCGGAAGGTG

### Variant D Polynucleotide Sequence:

(SEQ ID NO: 454)
TCAGAAGTCGAGTTTAGCCACGAATATTGGATGCGCCACGCCCTCACCCTGGCCAAGAGAGC
CCGGGACGAGCGCGAGGTGCCCGTGGGCGCCGTCCTGGTGCACAACAACAGGGTGATCGGCG
AGGGCTGGAACCGGGCCATCGGCCTGCACGACCCCACAGCCCACGCCGAGATCATGGCCCTG
CGGCAGGGTGGCCTGGTCATGCAGAACTACAGGCTGTATGACGCCACCCTGTACACCACATT
CGAGCCCTGCGTGATGTGCGCCGGGGCCATGATCCACAGCCGGATCGGCCGCGTGGTGTTCG
GCGTGCGGAACGCCAAGACCGGCGCCGCCGGCAGCCTGATGGACGTTCTGCACTACCCCGGG
ATGAACCACAGGGTGGAGATCACAGAGGGCATCCTGGCAGACGAGTGCGCCGCCCTGCTGTG
CACTTTCTTCAGGATGCCCAGATCTGTGTTCAAGGCCCAGAAGAAGGCCCAGAGCTCCACCG
ACGAGGGCGGATCTGAGGAAGAGGAAGAGAGCGGCAGCGACAAGAAGTACTCCATCGGCCTG
GCCATCGGCACCAACTCCGTGGGTTGGGCCGTGATCACCGATGAGTACAAGGTGCCCAGCAA
GAAGTTCAAGGTGCTGGGCAACACCGACAGGCACTCTATCAAGAAGAACCTGATCGGCGCCC
TGCTGTTCGACAGCGGGGAGACCGCTGAGGCCACTCGGCTGAAGAGAACCGCCAGGCGCAGA
TACACCCGGAGAAAGAACCGGATCTGCTACCTGCAGGAGATCTTCAGCAACGAGATGGCCAA
GGTGGACGACAGCTTCTTCCACAGGCTGGAGGAGAGCTTCCTGGTGGAGGAGGACAAGAAGC
ACGAGCGCCACCCCATCTTCGGCAACATCGTGGATGAGGTGGCCTACCACGAGAAGTACCCC
ACCATCTACCACCTGCGGAAGAAGCTGGTGGACAGCACCGATAAGGCCGATCTGCGGCTGAT
CTACCTGGCCCTGGCCCACATGATCAAGTTCAGGGGGCACTTCCTGATCGAGGGCGACCTGA
ACCCCGACAACTCCGATGTGGATAAACTGTTCATCCAGCTGGTGCAGACCTACAACCAGCTG
TTTGAGGAGAATCCCATCAACGCCTCCGGCGTGGACGCCAAGGCCATCCTGAGCGCCCGGCT
GTCCAAGAGCCGGAGGCTGGAGAATCTGATCGCCCAGCTGCCTGGCGAGAAGAAGAACGGCC
TGTTCGGCAACCTGATCGCCCTGAGCCTGGGCCTGACCCCCAATTTCAAGAGCAACTTCGAC
CTGGCCGAGGATGCTAAGCTGCAGCTGTCCAAGGACACCTACGACGATGACCTGGACAACCT
GCTGGCTCAGATCGGCGATCAGTACGCCGACCTGTTCCTGGCCGCCAAGAACCTGTCAGACG
CCATCCTGCTGTCTGACATTCTGCGGGTGAACACCGAGATCACCAAGGCCCCACTGTCCGCC
TCTATGGTGAAGAGGTACGATGAGCACCACCAGGACCTGACCCTGCTGAAGGCTCTGGTGCG
GCAGCAGCTGCCGGAGAAGTACAAGGAGATCTTCTTCGACCAGAGCAAGAACGGCTACGCCG
GCTACATCGACGGCGGGGCCAGCCAGGAGGAGTTCTACAAGTTCATCAAGCCTATCCTGGAG
AAGATGGACGGCACCGAGGAGCTGCTGGTGAAGCTGAACCGGGAGGACCTGCTGCGGAAGCA
GAGGACCTTCGACAACGGCATCATTCCCCACCAGATCCACCTGGGCGAGCTGCACGCCATCC
TGCGGAGGCAGGGCGACTTCTACCCTTTCCTGAAGGACAACAGGGAGAAGATCGAGAAGATC
CTGACCTTCAGGATCCCCTACTACGTGGGCCCCCTGGCCCGCGGCAACTCCCGCTTTGCCTG
GATGACCAGAAAGAGCGAGGAGACCATCACCCCTTGGAACTTCGAGGAGGTGGTGGACAAGG
GCGCCAGCGCCCAGAGCTTCATCGAGCGCATGACCAACTTCGACAAGAATCTGCCCAACGAG
AAGGTGCTGCCCAAGCACTCCCTGCTGTACGAGTACTTCACCGTGTACAACGAGCTGACAAA
GGTGAAGTACGTGACAGAGGGCATGCGCAAGCCCGCCTTCCTGTCTGGCGAGCAGAAGAAGG
CCATCGTGGACCTGCTGTTCAAGACCAACAGGAAGGTGACCGTGAAGCAGCTGAAGGAGGAC
TACTTCAAGAAGATCGAGTGCTTCGACAGCGTGGAGATCAGCGGCGTGGAGGACAGGTTCAA
CGCCAGCCTGGGCACCTACCACGACCTGCTGAAGATCATCAAGGACAAGGACTTCCTGGATA
ACGAGGAGAACGAGGATATCCTGGAGGACATTGTCCTGACCCTGACCCTGTTCGAGGATCGG
GAGATGATCGAGGAGCGCCTCAAGACCTACGCCCACCTGTTCGACGATAAGGTGATGAAGCA
GCTGAAGCGGCTGCGCTACACCGGCTGGGGCCGCCTGTCCCGGAAGCTGATCAACGGCATCC
GGGACAAGCAGTCCGGCAAGACCATCCTGGACTTCCTGAAGTCCGATGGTTTTGCCAACAGA
AACTTCATGCAGCTGATCCACGACGACAGCCTGACCTTCAAGGAGGACATCCAGAAGGCTCA
GGTGTCCGGACAGGGGGACTCCCTGCACGAGCACATCGCCAACCTGGCCGGCTCTCCCGCCA
TCAAGAAGGGCATCCTGCAGACCGTGAAGGTGGTGGACGAGCTGGTGAAGGTGATGGGCGGG
CACAAGCCCGAGAACATCGTGATCGAGATGGCCCGGGAGAACCAGACCACCCAGAAGGGCCA
GAAGAACAGCAGGGAGCGCATGAAGCGCATCGAGGAGGGCATCAAGGAGCTGGGTAGCCAGA
TCCTGAAGGAGCACCCTGTGGAGAATACCCAGCTGCAGAACGAGAAGCTGTATCTGTACTAC
CTGCAGAACGGCAGGGACATGTACGTGGATCAGGAGCTGGACATCAACCGGCTGTCTGACTA
CGACGTGGACCACATCGTGCCCCAGTCTTTCCTGAAGGACGACAGCATCGACAACAAGGTGC
TGACCCGCAGCGACAAGAACAGGGGCAAGAGCGATAACGTGCCCTCCGAGGAGGTGGTCAAG
AAGATGAAGAACTACTGGCGGCAGCTGCTGAACGCCAAGCTGATCACCCAGCGGAAGTTCGA
CAACCTGACCAAGGCCGAGAGAGGCGGCCTGTCCGAGCTGGACAAGGCCGGCTTCATCAAGC
GGCAGCTGGTGGAGACCCGGCAGATCACCAAGCACGTCGCCCAGATCCTGGACTCCAGGATG
AACACCAAGTACGACGAGAACGACAAGCTGATCAGAGAGGTGAAGGTGATCACCCTGAAGTC
CAAGCTGGTGAGCGACTTCAGGAAGGATTTCCAGTTCTACAAGGTGCGGGAGATCAACAACT
ATCACCACGCCCACGACGCCTACCTGAACGCCGTCGTGGGCACCGCTCTGATCAAGAAGTAT
CCTAAGCTGGAGAGCGAGTTCGTGTACGGCGACTACAAGGTGTACGACGTGCGGAAGATGAT
CGCCAAGAGCGAGCAGGAGATCGGCAAGGCCACCGCCAAGTACTTCTTCTACTCCAATATCA
TGAACTTCTTCAAGACCGAGATCACCCTGGCCAACGGGGAGATCCGGAAGCGCCCACTGATC
GAGACCAACGGCGAGACCGGCGAGATCGTGTGGGACAAGGGCAGGGACTTCGCCACCGTGAG
GAAGGTGCTGTCCATGCCCCAGGTGAACATCGTGAAAAAGACCGAGGTGCAGACCGGGGGGT
TCTCCAAGGAGAGCATCCTGCCCAAGGGCAACAGCGACAAGCTGATCGCCCGGAAGAAGGAC
TGGGACCCCAAGAAGTACGGAGGCTTCATGtAtCCTACCGTGGCCTACTCCGTGCTGGTGGT
GGCCAAGGTGGAGAAGGGCAAGTCCAAGAAGCTGAAGTCAGTGAAGGAGCTGCTGGGCATCA
CCATCATGGAGCGGTCTAGCTTCGAGAAGAATCCTATTGACTTCCTGGAGGCCAAGGGCTAC
AAGGAGGTCAAGAAGGATCTGATCATCAAGCTGCCCAAGTACAGCCTGTTCGAGCTGGAGAA
TGGCCGGAAGAGGATGCTGGCCAGCGCCAAGTTCCTGCAGAAGGGCAACGAGCTGGCCCTGC
CCAGCAAGTACGTGAACTTCCTCTATCTGGCCAGCCACTACGAGAAGCTGAAGGGCTCTCCA
GAGGACAACGAGCAGAAGCAGCTGTTCGTGGAGCAGCACAAGCACTACCTGGACGAGATCAT
CGAGCAGATCTCCGAGTTCAGCAAGCGCGTGATCCTGGCCGACGCCAACCTGGACAAGGTGC
TGTCCGCTTACAACAAGCACAGGGACAAGCCCATCAGGGAGCAGGCCGAGAACATCATCCAC
CTGTTCACCCTGACCAACCTGGGCGCCCCCAGGGCCTTCAAGTACTTCGATACCACCATCGC
CAGGAAGGAGTACAaAAGTACTAAGGAGGTCCTGGATGCCACTCTGATCCACCAGAGCATCA
CCGGGCTGTACGAGACCCGGATCGACCTGTCCCAGCTGGGCGGCGACGAGGGCGCCGACAAG
CGGACAGCCGACGGCAGCGAGTTCGAGAGCCCCAAGAAGAAGCGGAAGGTG

### Variant E Polynucleotide Sequence:

(SEQ ID NO: 455)
TCAGAAGTCGAGTTTAGCCACGAATATTGGATGCGCCACGCCCTCACCCTGGCCAAGAGAGC
CCGGGACGAGCGCGAGGTGCCCGTGGGCGCCGTCCTGGTGCACAACAACAGGGTGATCGGCG
AGGGCTGGAACCGGGCCATCGGCCTGCACGACCCCACAGCCCACGCCGAGATCATGGCCCTG
CGGCAGGGTGGCCTGGTCATGCAGAACTACAGGCTGTATGACGCCACCCTGTACACCACATT
CGAGCCCTGCGTGATGTGCGCCGGGGCCATGATCCACAGCCGGATCGGCCGCGTGGTGTTCG
GCGTGCGGAACGCCAAGACCGGCGCCGCCGGCAGCCTGATGGACGTTCTGCACTACCCCGGG
ATGAACCACAGGGTGGAGATCACAGAGGGCATCCTGGCAGACGAGTGCGCCGCCCTGCTGTG
CACTTTCTTCAGGATGCCCAGATCTGTGTTCAAGGCCCAGAAGAAGGCCCAGAGCTCCACCG
ACAAAGGCCCTAAGCCCAAGAAGGAAGAGAGCGAGAAGGACAAGAAGTACTCCATCGGCCTG
GCCATCGGCACCAACTCCGTGGGTTGGGCCGTGATCACCGATGAGTACAAGGTGCCCAGCAA
GAAGTTCAAGGTGCTGGGCAACACCGACAGGCACTCTATCAAGAAGAACCTGATCGGCGCCC
TGCTGTTCGACAGCGGGGAGACCGCTGAGGCCACTCGGCTGAAGAGAACCGCCAGGCGCAGA
TACACCCGGAGAAAGAACCGGATCTGCTACCTaCAGGAGATCTTCAGCAACGAGATGGCCAA
GGTGGACGACAGCTTCTTCCACAGGCTGGAGGAGAGCTTCCTGGTGGAGGAGGACAAGAAGC
ACGAGCGCCACCCCATCTTCGGCAACATCGTGGATGAGGTGGCCTACCACGAGAAGTACCCC
ACCATCTACCACCTGCGGAAGAAGCTGGTGGACAGCACCGATAAGGCCGATCTGCGGCTGAT
CTACCTGGCCCTGGCCCACATGATCAAGTTCAGGGGGCACTTCCTGATCGAGGGCGACCTGA
ACCCCGACAACTCCGATGTGGATAAACTGTTCATCCAGCTGGTGCAGACCTACAACCAGCTG
TTTGAGGAGAATCCCATCAACGCCTCCGGCGTGGACGCCAAGGCCATCCTGAGCGCCCGGCT
GTCCAAGAGCCGGAGGCTGGAGAATCTGATCGCCCAGCTGCCTGGCGAGAAGAAGAACGGCC
TGTTCGGCAACCTGATCGCCCTGAGCCTGGGCCTGACCCCCAATTTCAAGAGCAACTTCGAC
CTGGCCGAGGATGCTAAGCTGCAGCTGTCCAAGGACACCTACGACGATGACCTGGACAACCT
GCTGGCTCAGATCGGCGATCAGTACGCCGACCTGTTCCTGGCCGCCAAGAACCTGTCAGACG
CCATCCTGCTGTCTGACATTCTGCGGGTGAACACCGAGATCACCAAGGCCCCACTGTCCGCC
TCTATGGTGAAGAGGTACGATGAGCACCACCAGGACCTGACCCTGCTGAAGGCTCTGGTGCG
GCAGCAGCTGCCGGAGAAGTACAAGGAGATCTTCTTCGACCAGAGCAAGAACGGCTACGCCG
GCTACATCGACGGCGGGGCCAGCCAGGAGGAGTTCTACAAGTTCATCAAGCCTATCCTGGAG
AAGATGGACGGCACCGAGGAGCTGCTGGTGAAGCTGAACCGGGAGGACCTGCTGCGGAAGCA
GAGGACCTTCGACAACGGCATCATTCCCCACCAGATCCACCTGGGCGAGCTGCACGCCATCC
TGCGGAGGCAGGGCGACTTCTACCCTTTCCTGAAGGACAACAGGGAGAAGATCGAGAAGATC
CTGACCTTCAGGATCCCCTACTACGTGGGCCCCCTGGCCCGCGGCAACTCCCGCTTTGCCTG
GATGACCAGAAAGAGCGAGGAGACCATCACCCCTTGGAACTTCGAGGAGGTGGTGGACAAGG
GCGCCAGCGCCCAGAGCTTCATCGAGCGCATGACCAACTTCGACAAGAATCTGCCCAACGAG
AAGGTGCTGCCCAAGCACTCCCTGCTGTACGAGTACTTCACCGTGTACAACGAGCTGACAAA
GGTGAAGTACGTGACAGAGGGCATGCGCAAGCCCGCCTTCCTGTCTGGCGAGCAGAAGAAGG
CCATCGTGGACCTGCTGTTCAAGACCAACAGGAAGGTGACCGTGAAGCAGCTGAAGGAGGAC
TACTTCAAGAAGATCGAGTGCTTCGACAGCGTGGAGATCAGCGGCGTGGAGGACAGGTTCAA
CGCCAGCCTGGGCACCTACCACGACCTGCTGAAGATCATCAAGGACAAGGACTTCCTGGATA
ACGAGGAGAACGAGGATATCCTGGAGGACATTGTCCTGACCCTGACCCTGTTCGAGGATCGG
GAGATGATCGAGGAGCGCCTCAAGACCTACGCCCACCTGTTCGACGATAAGGTGATGAAGCA
GCTGAAGCGGCTGCGCTACACCGGCTGGGGCCGCCTGTCCCGGAAGCTGATCAACGGCATCC
GGGACAAGCAGTCCGGCAAGACCATCCTGGACTTCCTGAAGTCCGATGGTTTTGCCAACAGA
AACTTCATGCAGCTGATCCACGACGACAGCCTGACCTTCAAGGAGGACATCCAGAAGGCTCA
GGTGTCCGGACAGGGGGACTCCCTGCACGAGCACATCGCCAACCTGGCCGGCTCTCCCGCCA
TCAAGAAGGGCATCCTGCAGACCGTGAAGGTGGTGGACGAGCTGGTGAAGGTGATGGGCGGG
CACAAGCCCGAGAACATCGTGATCGAGATGGCCCGGGAGAACCAGACCACCCAGAAGGGCCA
GAAGAACAGCAGGGAGCGCATGAAGCGCATCGAGGAGGGCATCAAGGAGCTGGGTAGCCAGA
TCCTGAAGGAGCACCCTGTGGAGAATACCCAGCTGCAGAACGAGAAGCTGTATCTGTACTAC
CTGCAGAACGGCAGGGACATGTACGTGGATCAGGAGCTGGACATCAACCGGCTGTCTGACTA
CGACGTGGACCACATCGTGCCCCAGTCTTTCCTGAAGGACGACAGCATCGACAACAAGGTGC
TGACCCGCAGCGACAAGAACAGGGGCAAGAGCGATAACGTGCCCTCCGAGGAGGTGGTCAAG
AAGATGAAGAACTACTGGCGGCAGCTGCTGAACGCCAAGCTGATCACCCAGCGGAAGTTCGA
CAACCTGACCAAGGCCGAGAGAGGCGGCCTGTCCGAGCTGGACAAGGCCGGCTTCATCAAGC
GGCAGCTGGTGGAGACCCGGCAGATCACCAAGCACGTCGCCCAGATCCTGGACTCCAGGATG
AACACCAAGTACGACGAGAACGACAAGCTGATCAGAGAGGTGAAGGTGATCACCCTGAAGTC
CAAGCTGGTGAGCGACTTCAGGAAGGATTTCCAGTTCTACAAGGTGCGGGAGATCAACAACT
ATCACCACGCCCACGACGCCTACCTGAACGCCGTCGTGGGCACCGCTCTGATCAAGAAGTAT
CCTAAGCTGGAGAGCGAGTTCGTGTACGGCGACTACAAGGTGTACGACGTGCGGAAGATGAT
CGCCAAGAGCGAGCAGGAGATCGGCAAGGCCACCGCCAAGTACTTCTTCTACTCCAATATCA
TGAACTTCTTCAAGACCGAGATCACCCTGGCCAACGGGGAGATCCGGAAGCGCCCACTGATC
GAGACCAACGGCGAGACCGGCGAGATCGTGTGGGACAAGGGCAGGGACTTCGCCACCGTGAG
GAAGGTGCTGTCCATGCCCCAGGTGAACATCGTGAAAAAGACCGAGGTGCAGACCGGGGGGT
TCTCCAAGGAGAGCATCCTGCCCAAGGGCAACAGCGACAAGCTGATCGCCCGGAAGAAGGAC
TGGGACCCCAAGAAGTACGGAGGCTTCtTGtAtCCTACCGTGGCCTACTCCGTGCTGGTGGT
GGCCAAGGTGGAGAAGGGCAAGTCCAAGAAGCTGAAGTCAGTGAAGGAGCTGCTGGGCATCA
CCATCATGGAGCGGTCTAGCTTCGAGAAGAATCCTATTGACTTCCTGGAGGCCAAGGGCTAC
AAGGAGGTCAAGAAGGATCTGATCATCAAGCTGCCCAAGTACAGCCTGTTCGAGCTGGAGAA
TGGCCGGAAGAGGATGCTGGCCAGCGCCAAGTTCCTGCAGAAGGGCAACGAGCTGGCCCTGC
CCAGCAAGTACGTGAACTTCCTCTATCTGGCCAGCCACTACGAGAAGCTGAAGGGCTCTCCA
GAGGACAACGAGCAGAAGCAGCTGTTCGTGGAGCAGCACAAGCACTACCTGGACGAGATCAT
CGAGCAGATCTCCGAGTTCAGCAAGCGCGTGATCCTGGCCGACGCCAACCTGGACAAGGTGC
TGTCCGCTTACAACAAGCACAGGGACAAGCCCATCAGGGAGCAGGCCGAGAACATCATCCAC
CTGTTCACCCTGACCAACCTGGGCGCCCCCAGGGCCTTCAAGTACTTCGATACCACCATCGC
CAGGAAGGAGTACAaAAGTACTAAGGAGGTCCTGGATGCCACTCTGATCCACCAGAGCATCA
CCGGGCTGTACGAGACCCGGATCGACCTGTCCCAGCTGGGCGGCGACGAGGGCGCCGACAAG
CGGACAGCCGACGGCAGCGAGTTCGAGAGCCCCAAGAAGAAGCGGAAGGTG

### Variant F Polynucleotide Sequence:

(SEQ ID NO: 456)
TCAGAAGTCGAGTTTAGCCACGAATATTGGATGCGCCACGCCCTCACCCTGGCCAAGAGAGC
CCGGGACGAGCGCGAGGTGCCCGTGGGCGCCGTCCTGGTGCACAACAACAGGGTGATCGGCG
AGGGCTGGAACCGGGCCATCGGCCTGCACGACCCCACAGCCCACGCCGAGATCATGGCCCTG
CGGCAGGGTGGCCTGGTCATGCAGAACTACAGGCTGTATGACGCCACCCTGTACACCACATT
CGAGCCCTGCGTGATGTGCGCCGGGGCCATGATCCACAGCCGGATCGGCCGCGTGGTGTTCG
GCGTGCGGAACGCCAAGACCGGCGCCGCCGGCAGCCTGATGGACGTTCTGCACTACCCCGGG
ATGAACCACAGGGTGGAGATCACAGAGGGCATCCTGGCAGACGAGTGCGCCGCCCTGCTGTG
CACTTTCTTCAGGATGCCCAGATCTGTGTTCAAGGCCCAGAAGAAGGCCCAGAGCTCCACCG
ACAGCGGCGGGAGCTCTGGGGGCTCCTCCGGGAGCGAGACCCCCGGGACCAGCGAGTCCGCC
ACCCCCGAGAGCAGCGGCGGCAGCTCCGGGGGGAGCGACAAGAAGTACTCCATCGGCCTGGC
CATCGGCACCAACTCCGTGGGTTGGGCCGTGATCACCGATGAGTACAAGGTGCCCAGCAAGA
AGTTCAAGGTGCTGGGCAACACCGACAGGCACTCTATCAAGAAGAACCTGATCGGCGCCCTG
CTGTTCGACAGCGGGGAGACCGCTGAGGCCACTCGGCTGAAGAGAACCGCCAGGCGCAGATA
CACCCGGAGAAAGAACCGGATCTGCTACCTGCAGGAGATCTTCAGCAACGAGATGGCCAAGG
TGGACGACAGCTTCTTCCACAGGCTGGAGGAGAGCTTCCTGGTGGAGGAGGACAAGAAGCAC
GAGCGCCACCCCATCTTCGGCAACATCGTGGATGAGGTGGCCTACCACGAGAAGTACCCCAC
CATCTACCACCTGCGGAAGAAGCTGGTGGACAGCACCGATAAGGCCGATCTGCGGCTGATCT
ACCTGGCCCTGGCCCACATGATCAAGTTCAGGGGGCACTTCCTGATCGAGGGCGACCTGAAC
CCCGACAACTCCGATGTGGATAAACTGTTCATCCAGCTGGTGCAGACCTACAACCAGCTGTT
TGAGGAGAATCCCATCAACGCCTCCGGCGTGGACGCCAAGGCCATCCTGAGCGCCCGGCTGT
CCAAGAGCCGGAGGCTGGAGAATCTGATCGCCCAGCTGCCTGGCGAGAAGAAGAACGGCCTG
TTCGGCAACCTGATCGCCCTGAGCCTGGGCCTGACCCCCAATTTCAAGAGCAACTTCGACCT
GGCCGAGGATGCTAAGCTGCAGCTGTCCAAGGACACCTACGACGATGACCTGGACAACCTGC
TGGCTCAGATCGGCGATCAGTACGCCGACCTGTTCCTGGCCGCCAAGAACCTGTCAGACGCC
ATCCTGCTGTCTGACATTCTGCGGGTGAACACCGAGATCACCAAGGCCCCACTGTCCGCCTC
TATGGTGAAGAGGTACGATGAGCACCACCAGGACCTGACCCTGCTGAAGGCTCTGGTGCGGC
AGCAGCTGCCGGAGAAGTACAAGGAGATCTTCTTCGACCAGAGCAAGAACGGCTACGCCGGC
TACATCGACGGCGGGGCCAGCCAGGAGGAGTTCTACAAGTTCATCAAGCCTATCCTGGAGAA
GATGGACGGCACCGAGGAGCTGCTGGTGAAGCTGAACCGGGAGGACCTGCTGCGGAAGCAGA
GGACCTTCGACAACGGCATCATTCCCCACCAGATCCACCTGGGCGAGCTGCACGCCATCCTG
CGGAGGCAGGGCGACTTCTACCCTTTCCTGAAGGACAACAGGGAGAAGATCGAGAAGATCCT
GACCTTCAGGATCCCCTACTACGTGGGCCCCCTGGCCCGCGGCAACTCCCGCTTTGCCTGGA
TGACCAGAAAGAGCGAGGAGACCATCACCCCTTGGAACTTCGAGGAGGTGGTGGACAAGGGC
GCCAGCGCCCAGAGCTTCATCGAGCGCATGACCAACTTCGACAAGAATCTGCCCAACGAGAA
GGTGCTGCCCAAGCACTCCCTGCTGTACGAGTACTTCACCGTGTACAACGAGCTGACAAAGG
TGAAGTACGTGACAGAGGGCATGCGCAAGCCCGCCTTCCTGTCTGGCGAGCAGAAGAAGGCC
ATCGTGGACCTGCTGTTCAAGACCAACAGGAAGGTGACCGTGAAGCAGCTGAAGGAGGACTA
CTTCAAGAAGATCGAGTGCTTCGACAGCGTGGAGATCAGCGGCGTGGAGGACAGGTTCAACG
CCAGCCTGGGCACCTACCACGACCTGCTGAAGATCATCAAGGACAAGGACTTCCTGGATAAC
GAGGAGAACGAGGATATCCTGGAGGACATTGTCCTGACCCTGACCCTGTTCGAGGATCGGGA
GATGATCGAGGAGCGCCTCAAGACCTACGCCCACCTGTTCGACGATAAGGTGATGAAGCAGC
TGAAGCGGCTGCGCTACACCGGCTGGGGCCGCCTGTCCCGGAAGCTGATCAACGGCATCCGG
GACAAGCAGTCCGGCAAGACCATCCTGGACTTCCTGAAGTCCGATGGTTTTGCCAACAGAAA
CTTCATGCAGCTGATCCACGACGACAGCCTGACCTTCAAGGAGGACATCCAGAAGGCTCAGG
TGTCCGGACAGGGGGACTCCCTGCACGAGCACATCGCCAACCTGGCCGGCTCTCCCGCCATC
AAGAAGGGCATCCTGCAGACCGTGAAGGTGGTGGACGAGCTGGTGAAGGTGATGGGCGGGCA
CAAGCCCGAGAACATCGTGATCGAGATGGCCCGGGAGAACCAGACCACCCAGAAGGGCCAGA
AGAACAGCAGGGAGCGCATGAAGCGCATCGAGGAGGGCATCAAGGAGCTGGGTAGCCAGATC
CTGAAGGAGCACCCTGTGGAGAATACCCAGCTGCAGAACGAGAAGCTGTATCTGTACTACCT
GCAGAACGGCAGGGACATGTACGTGGATCAGGAGCTGGACATCAACCGGCTGTCTGACTACG
ACGTGGACCACATCGTGCCCCAGTCTTTCCTGAAGGACGACAGCATCGACAACAAGGTGCTG
ACCCGCAGCGACAAGAACAGGGGCAAGAGCGATAACGTGCCCTCCGAGGAGGTGGTCAAGAA
GATGAAGAACTACTGGCGGCAGCTGCTGAACGCCAAGCTGATCACCCAGCGGAAGTTCGACA
ACCTGACCAAGGCCGAGAGAGGCGGCCTGTCCGAGCTGGACAAGGCCGGCTTCATCAAGCGG
CAGCTGGTGGAGACCCGGCAGATCACCAAGCACGTCGCCCAGATCCTGGACTCCAGGATGAA
CACCAAGTACGACGAGAACGACAAGCTGATCAGAGAGGTGAAGGTGATCACCCTGAAGTCCA
AGCTGGTGAGCGACTTCAGGAAGGATTTCCAGTTCTACAAGGTGCGGGAGATCAACAACTAT
CACCACGCCCACGACGCCTACCTGAACGCCGTCGTGGGCACCGCTCTGATCAAGAAGTATCC
TAAGCTGGAGAGCGAGTTCGTGTACGGCGACTACAAGGTGTACGACGTGCGGAAGATGATCG
CCAAGAGCGAGCAGGAGATCGGCAAGGCCACCGCCAAGTACTTCTTCTACTCCAATATCATG
AACTTCTTCAAGACCGAGATCACCCTGGCCAACGGGGAGATCCGGAAGCGCCCACTGATCGA
GACCAACGGCGAGACCGGCGAGATCGTGTGGGACAAGGGCAGGGACTTCGCCACCGTGAGGA
AGGTGCTGTCCATGCCCCAGGTGAACATCGTGAAAAAGACCGAGGTGCAGACCGGGGGGTTC
TCCAAGGAGAGCATCCTGCCCAAGGGCAACAGCGACAAGCTGATCGCCCGGAAGAAGGACTG
GGACCCCAAGAAGTACGGAGGCTTCCTGTATCCTACCGTGGCCTACTCCGTGCTGGTGGTGG
CCAAGGTGGAGAAGGGCAAGTCCAAGAAGCTGAAGTCAGTGAAGGAGCTGCTGGGCATCACC
ATCATGGAGCGGTCTAGCTTCGAGAAGAATCCTATTGACTTCCTGGAGGCCAAGGGCTACAA
GGAGGTCAAGAAGGATCTGATCATCAAGCTGCCCAAGTACAGCCTGTTCGAGCTGGAGAATG
GCCGGAAGAGGATGCTGGCCAGCGCCAAGTTCCTGCAGAAGGGCAACGAGCTGGCCCTGCCC
AGCAAGTACGTGAACTTCCTCTATCTGGCCAGCCACTACGAGAAGCTGAAGGGCTCTCCAGA
GGACAACGAGCAGAAGCAGCTGTTCGTGGAGCAGCACAAGCACTACCTGGACGAGATCATCG
AGCAGATCTCCGAGTTCAGCAAGCGCGTGATCCTGGACGACGCCAACCTGGACAAGGTGCTG
TCCGCTTACAACAAGCACAGGGACAAGCCCATCAGGGAGCAGGCCGAGAACATCATCCACCT
GTTCACCCTGACCAACCTGGGCGCCCCCAGGGCCTTCAAGTACTTCGATACCACCATCGCCA
GGAAGGAGTACAAAAGTACTAAGGAGGTCCTGGATGCCACTCTGATCCACCAGAGCATCACC
GGGCTGTACGAGACCCGGATCGACCTGTCCCAGCTGGGCGGCGACGAGGGCGCCGACAAGCG
GACAGCCGACGGCAGCGAGTTCGAGAGCCCCAAGAAGAAGCGGAAGGTG

### Variant G Nucleotide Sequence:

(SEQ ID NO: 457)
TCAGAAGTCGAGTTTAGCCACGAATATTGGATGCGCCACGCCCTCACCCTGGCCAAGAGAGC
CCGGGACGAGCGCGAGGTGCCCGTGGGCGCCGTCCTGGTGCACAACAACAGGGTGATCGGCG
AGGGCTGGAACCGGGCCATCGGCCTGCACGACCCCACAGCCCACGCCGAGATCATGGCCCTG
CGGCAGGGTGGCCTGGTCATGCAGAACTACAGGCTGTATGACGCCACCCTGTACACCACATT
CGAGCCCTGCGTGATGTGCGCCGGGGCCATGATCCACAGCCGGATCGGCCGCGTGGTGTTCG
GCGTGCGGAACGCCAAGACCGGCGCCGCCGGCAGCCTGATGGACGTTCTGCACTACCCCGGG
ATGAACCACAGGGTGGAGATCACAGAGGGCATCCTGGCAGACGAGTGCGCCGCCCTGCTGTG
CACTTTCTTCAGGATGCCCAGATCTGTGTTCAAGGCCCAGAAGAAGGCCCAGAGCTCCACCG
ACAGCGGCGGGAGCTCTGGGGGCTCCTCCGGGAGCGAGACCCCCGGGACCAGCGAGTCCGCC
ACCCCCGAGAGCAGCGGCGGCAGCTCCGGGGGGAGCGACAAGAAGTACTCCATCGGCCTGGC
CATCGGCACCAACTCCGTGGGTTGGGCCGTGATCACCGATGAGTACAAGGTGCCCAGCAAGA
AGTTCAAGGTGCTGGGCAACACCGACAGGCACTCTATCAAGAAGAACCTGATCGGCGCCCTG
CTGTTCGACAGCGGGGAGACCGCTGAGGCCACTCGGCTGAAGAGAACCGCCAGGCGCAGATA
CACCCGGAGAAAGAACCGGATCTGCTACCTGCAGGAGATCTTCAGCAACGAGATGGCCAAGG
TGGACGACAGCTTCTTCCACAGGCTGGAGGAGAGCTTCCTGGTGGAGGAGGACAAGAAGCAC
GAGCGCCACCCCATCTTCGGCAACATCGTGGATGAGGTGGCCTACCACGAGAAGTACCCCAC
CATCTACCACCTGCGGAAGAAGCTGGTGGACAGCACCGATAAGGCCGATCTGCGGCTGATCT
ACCTGGCCCTGGCCCACATGATCAAGTTCAGGGGGCACTTCCTGATCGAGGGCGACCTGAAC
CCCGACAACTCCGATGTGGATAAACTGTTCATCCAGCTGGTGCAGACCTACAACCAGCTGTT
TGAGGAGAATCCCATCAACGCCTCCGGCGTGGACGCCAAGGCCATCCTGAGCGCCCGGCTGT
CCAAGAGCCGGAGGCTGGAGAATCTGATCGCCCAGCTGCCTGGCGAGAAGAAGAACGGCCTG
TTCGGCAACCTGATCGCCCTGAGCCTGGGCCTGACCCCCAATTTCAAGAGCAACTTCGACCT
GGCCGAGGATGCTAAGCTGCAGCTGTCCAAGGACACCTACGACGATGACCTGGACAACCTGC
TGGCTCAGATCGGCGATCAGTACGCCGACCTGTTCCTGGCCGCCAAGAACCTGTCAGACGCC
ATCCTGCTGTCTGACATTCTGCGGGTGAACACCGAGATCACCAAGGCCCCACTGTCCGCCTC
TATGGTGAAGAGGTACGATGAGCACCACCAGGACCTGACCCTGCTGAAGGCTCTGGTGCGGC
AGCAGCTGCCGGAGAAGTACAAGGAGATCTTCTTCGACCAGAGCAAGAACGGCTACGCCGGC
TACATCGACGGCGGGGCCAGCCAGGAGGAGTTCTACAAGTTCATCAAGCCTATCCTGGAGAA
GATGGACGGCACCGAGGAGCTGCTGGTGAAGCTGAACCGGGAGGACCTGCTGCGGAAGCAGA
GGACCTTCGACAACGGCATCATTCCCCACCAGATCCACCTGGGCGAGCTGCACGCCATCCTG
CGGAGGCAGGGCGACTTCTACCCTTTCCTGAAGGACAACAGGGAGAAGATCGAGAAGATCCT
GACCTTCAGGATCCCCTACTACGTGGGCCCCCTGGCCCGCGGCAACTCCCGCTTTGCCTGGA
TGACCAGAAAGAGCGAGGAGACCATCACCCCTTGGAACTTCGAGGAGGTGGTGGACAAGGGC
GCCAGCGCCCAGAGCTTCATCGAGCGCATGACCAACTTCGACAAGAATCTGCCCAACGAGAA
GGTGCTGCCCAAGCACTCCCTGCTGTACGAGTACTTCACCGTGTACAACGAGCTGACAAAGG
TGAAGTACGTGACAGAGGGCATGCGCAAGCCCGCCTTCCTGTCTGGCGAGCAGAAGAAGGCC
ATCGTGGACCTGCTGTTCAAGACCAACAGGAAGGTGACCGTGAAGCAGCTGAAGGAGGACTA
CTTCAAGAAGATCGAGTGCTTCGACAGCGTGGAGATCAGCGGCGTGGAGGACAGGTTCAACG
CCAGCCTGGGCACCTACCACGACCTGCTGAAGATCATCAAGGACAAGGACTTCCTGGATAAC
GAGGAGAACGAGGATATCCTGGAGGACATTGTCCTGACCCTGACCCTGTTCGAGGATCGGGA
GATGATCGAGGAGCGCCTCAAGACCTACGCCCACCTGTTCGACGATAAGGTGATGAAGCAGC
TGAAGCGGCTGCGCTACACCGGCTGGGGCCGCCTGTCCCGGAAGCTGATCAACGGCATCCGG
GACAAGCAGTCCGGCAAGACCATCCTGGACTTCCTGAAGTCCGATGGTTTTGCCAACAGAAA
CTTCATGCAGCTGATCCACGACGACAGCCTGACCTTCAAGGAGGACATCCAGAAGGCTCAGG
TGTCCGGACAGGGGGACTCCCTGCACGAGCACATCGCCAACCTGGCCGGCTCTCCCGCCATC
AAGAAGGGCATCCTGCAGACCGTGAAGGTGGTGGACGAGCTGGTGAAGGTGATGGGCGGGCA
CAAGCCCGAGAACATCGTGATCGAGATGGCCCGGGAGAACCAGACCACCCAGAAGGGCCAGA
AGAACAGCAGGGAGCGCATGAAGCGCATCGAGGAGGGCATCAAGGAGCTGGGTAGCCAGATC
CTGAAGGAGCACCCTGTGGAGAATACCCAGCTGCAGAACGAGAAGCTGTATCTGTACTACCT
GCAGAACGGCAGGGACATGTACGTGGATCAGGAGCTGGACATCAACCGGCTGTCTGACTACG
ACGTGGACCACATCGTGCCCCAGTCTTTCCTGAAGGACGACAGCATCGACAACAAGGTGCTG
ACCCGCAGCGACAAGAACAGGGGCAAGAGCGATAACGTGCCCTCCGAGGAGGTGGTCAAGAA
GATGAAGAACTACTGGCGGCAGCTGCTGAACGCCAAGCTGATCACCCAGCGGAAGTTCGACA
ACCTGACCAAGGCCGAGAGAGGCGGCCTGTCCGAGCTGGACAAGGCCGGCTTCATCAAGCGG
CAGCTGGTGGAGACCCGGCAGATCACCAAGCACGTCGCCCAGATCCTGGACTCCAGGATGAA
CACCAAGTACGACGAGAACGACAAGCTGATCAGAGAGGTGAAGGTGATCACCCTGAAGTCCA
AGCTGGTGAGCGACTTCAGGAAGGATTTCCAGTTCTACAAGGTGCGGGAGATCAACAACTAT
CACCACGCCCACGACGCCTACCTGAACGCCGTCGTGGGCACCGCTCTGATCAAGAAGTATCC
TAAGCTGGAGAGCGAGTTCGTGTACGGCGACTACAAGGTGTACGACGTGCGGAAGATGATCG
CCAAGAGCGAGCAGGAGATCGGCAAGGCCACCGCCAAGTACTTCTTCTACTCCAATATCATG
AACTTCTTCAAGACCGAGATCACCCTGGCCAACGGGGAGATCCGGAAGCGCCCACTGATCGA
GACCAACGGCGAGACCGGCGAGATCGTGTGGGACAAGGGCAGGGACTTCGCCACCGTGAGGA
AGGTGCTGTCCATGCCCCAGGTGAACATCGTGAAAAAGACCGAGGTGCAGACCGGGGGGTTC
TCCAAGGAGAGCATCCTGCCCAAGGGCAACAGCGACAAGCTGATCGCCCGGAAGAAGGACTG
GGACCCCAAGAAGTACGGAGGCTTCCTGCAGCCTACCGTGGCCTACTCCGTGCTGGTGGTGG
CCAAGGTGGAGAAGGGCAAGTCCAAGAAGCTGAAGTCAGTGAAGGAGCTGCTGGGCATCACC
ATCATGGAGCGGTCTAGCTTCGAGAAGAATCCTATTGACTTCCTGGAGGCCAAGGGCTACAA
GGAGGTCAAGAAGGATCTGATCATCAAGCTGCCCAAGTACAGCCTGTTCGAGCTGGAGAATG
GCCGGAAGAGGATGCTGGCCAGCGCCAAGTTCCTGCAGAAGGGCAACGAGCTGGCCCTGCCC
AGCAAGTACGTGAACTTCCTCTATCTGGCCAGCCACTACGAGAAGCTGAAGGGCTCTCCAAA
GGACAACGAGCAGAAGCAGCTGTTCGTGGAGCAGCACAAGCACTACCTGGACGAGATCATCG
AGCAGATCTCCGAGTTCAGCAAGCGCGTGATCCTGGACGACGCCAACCTGGACAAGGTGCTG
TCCGCTTACAACAAGCACAGGGACAAGCCCATCAGGGAGCAGGCCGAGAACATCATCCACCT
GTTCACCCTGACCAACCTGGGCGCCCCCAGGGCCTTCAAGTACTTCGATACCACCATCGCCA
GGAAGGAGTACAAAAGTACTAAGGAGGTCCTGGATGCCACTCTGATCCACCAGAGCATCACC
GGGCTGTACGAGACCCGGATCGACCTGTCCCAGCTGGGCGGCGACGAGGGCGCCGACAAGCG
GACAGCCGACGGCAGCGAGTTCGAGAGCCCCAAGAAGAAGCGGAAGGTG

### Variant H Polynucleotide Sequence:

(SEQ ID NO: 458)
TCAGAAGTCGAGTTTAGCCACGAATATTGGATGCGCCACGCCCTCACCCTGGCCAAGAGAGC
CCGGGACGAGCGCGAGGTGCCCGTGGGCGCCGTCCTGGTGCACAACAACAGGGTGATCGGCG
AGGGCTGGAACCGGGCCATCGGCCTGCACGACCCCACAGCCCACGCCGAGATCATGGCCCTG
CGGCAGGGTGGCCTGGTCATGCAGAACTACAGGCTGTATGACGCCACCCTGTACACCACATT
CGAGCCCTGCGTGATGTGCGCCGGGGCCATGATCCACAGCCGGATCGGCCGCGTGGTGTTCG
GCGTGCGGAACGCCAAGACCGGCGCCGCCGGCAGCCTGATGGACGTTCTGCACTACCCCGGG
ATGAACCACAGGGTGGAGATCACAGAGGGCATCCTGGCAGACGAGTGCGCCGCCCTGCTGTG
CACTTTCTTCAGGATGCCCAGATCTGTGTTCAAGGCCCAGAAGAAGGCCCAGAGCTCCACCG
ACAGCGGCGGGAGCTCTGGGGGCTCCTCCGGGAGCGAGACCCCCGGGACCAGCGAGTCCGCC
ACCCCCGAGAGCAGCGGCGGCAGCTCCGGGGGGAGCGACAAGAAGTACTCCATCGGCCTGGC
CATCGGCACCAACTCCGTGGGTTGGGCCGTGATCACCGATGAGTACAAGGTGCCCAGCAAGA
AGTTCAAGGTGCTGGGCAACACCGACAGGCACTCTATCAAGAAGAACCTGATCGGCGCCCTG
CTGTTCGACAGCGGGGAGACCGCTGAGGCCACTCGGCTGAAGAGAACCGCCAGGCGCAGATA
CACCCGGAGAAAGAACCGGATCTGCTACCTGCAGGAGATCTTCAGCAACGAGATGGCCAAGG
TGGACGACAGCTTCTTCCACAGGCTGGAGGAGAGCTTCCTGGTGGAGGAGGACAAGAAGCAC
GAGCGCCACCCCATCTTCGGCAACATCGTGGATGAGGTGGCCTACCACGAGAAGTACCCCAC
CATCTACCACCTGCGGAAGAAGCTGGTGGACAGCACCGATAAGGCCGATCTGCGGCTGATCT
ACCTGGCCCTGGCCCACATGATCAAGTTCAGGGGGCACTTCCTGATCGAGGGCGACCTGAAC
CCCGACAACTCCGATGTGGATAAACTGTTCATCCAGCTGGTGCAGACCTACAACCAGCTGTT
TGAGGAGAATCCCATCAACGCCTCCGGCGTGGACGCCAAGGCCATCCTGAGCGCCCGGCTGT
CCAAGAGCCGGAGGCTGGAGAATCTGATCGCCCAGCTGCCTGGCGAGAAGAAGAACGGCCTG
TTCGGCAACCTGATCGCCCTGAGCCTGGGCCTGACCCCCAATTTCAAGAGCAACTTCGACCT
GGCCGAGGATGCTAAGCTGCAGCTGTCCAAGGACACCTACGACGATGACCTGGACAACCTGC
TGGCTCAGATCGGCGATCAGTACGCCGACCTGTTCCTGGCCGCCAAGAACCTGTCAGACGCC
ATCCTGCTGTCTGACATTCTGCGGGTGAACACCGAGATCACCAAGGCCCCACTGTCCGCCTC
TATGGTGAAGAGGTACGATGAGCACCACCAGGACCTGACCCTGCTGAAGGCTCTGGTGCGGC
AGCAGCTGCCGGAGAAGTACAAGGAGATCTTCTTCGACCAGAGCAAGAACGGCTACGCCGGC
TACATCGACGGCGGGGCCAGCCAGGAGGAGTTCTACAAGTTCATCAAGCCTATCCTGGAGAA
GATGGACGGCACCGAGGAGCTGCTGGTGAAGCTGAACCGGGAGGACCTGCTGCGGAAGCAGA
GGACCTTCGACAACGGCATCATTCCCCACCAGATCCACCTGGGCGAGCTGCACGCCATCCTG
CGGAGGCAGGGCGACTTCTACCCTTTCCTGAAGGACAACAGGGAGAAGATCGAGAAGATCCT
GACCTTCAGGATCCCCTACTACGTGGGCCCCCTGGCCCGCGGCAACTCCCGCTTTGCCTGGA
TGACCAGAAAGAGCGAGGAGACCATCACCCCTTGGAACTTCGAGGAGGTGGTGGACAAGGGC
GCCAGCGCCCAGAGCTTCATCGAGCGCATGACCAACTTCGACAAGAATCTGCCCAACGAGAA
GGTGCTGCCCAAGCACTCCCTGCTGTACGAGTACTTCACCGTGTACAACGAGCTGACAAAGG
TGAAGTACGTGACAGAGGGCATGCGCAAGCCCGCCTTCCTGTCTGGCGAGCAGAAGAAGGCC
ATCGTGGACCTGCTGTTCAAGACCAACAGGAAGGTGACCGTGAAGCAGCTGAAGGAGGACTA
CTTCAAGAAGATCGAGTGCTTCGACAGCGTGGAGATCAGCGGCGTGGAGGACAGGTTCAACG
CCAGCCTGGGCACCTACCACGACCTGCTGAAGATCATCAAGGACAAGGACTTCCTGGATAAC
GAGGAGAACGAGGATATCCTGGAGGACATTGTCCTGACCCTGACCCTGTTCGAGGATCGGGA
GATGATCGAGGAGCGCCTCAAGACCTACGCCCACCTGTTCGACGATAAGGTGATGAAGCAGC
TGAAGCGGCTGCGCTACACCGGCTGGGGCCGCCTGTCCCGGAAGCTGATCAACGGCATCCGG
GACAAGCAGTCCGGCAAGACCATCCTGGACTTCCTGAAGTCCGATGGTTTTGCCAACAGAAA
CTTCATGCAGCTGATCCACGACGACAGCCTGACCTTCAAGGAGGACATCCAGAAGGCTCAGG
TGTCCGGACAGGGGGACTCCCTGCACGAGCACATCGCCAACCTGGCCGGCTCTCCCGCCATC
AAGAAGGGCATCCTGCAGACCGTGAAGGTGGTGGACGAGCTGGTGAAGGTGATGGGCGGGCA
CAAGCCCGAGAACATCGTGATCGAGATGGCCCGGGAGAACCAGACCACCCAGAAGGGCCAGA
AGAACAGCAGGGAGCGCATGAAGCGCATCGAGGAGGGCATCAAGGAGCTGGGTAGCCAGATC
CTGAAGGAGCACCCTGTGGAGAATACCCAGCTGCAGAACGAGAAGCTGTATCTGTACTACCT
GCAGAACGGCAGGGACATGTACGTGGATCAGGAGCTGGACATCAACCGGCTGTCTGACTACG
ACGTGGACCACATCGTGCCCCAGTCTTTCCTGAAGGACGACAGCATCGACAACAAGGTGCTG
ACCCGCAGCGACAAGAACAGGGGCAAGAGCGATAACGTGCCCTCCGAGGAGGTGGTCAAGAA
GATGAAGAACTACTGGCGGCAGCTGCTGAACGCCAAGCTGATCACCCAGCGGAAGTTCGACA
ACCTGACCAAGGCCGAGAGAGGCGGCCTGTCCGAGCTGGACAAGGCCGGCTTCATCAAGCGG
CAGCTGGTGGAGACCCGGCAGATCACCAAGCACGTCGCCCAGATCCTGGACTCCAGGATGAA
CACCAAGTACGACGAGAACGACAAGCTGATCAGAGAGGTGAAGGTGATCACCCTGAAGTCCA
AGCTGGTGAGCGACTTCAGGAAGGATTTCCAGTTCTACAAGGTGCGGGAGATCAACAACTAT
CACCACGCCCACGACGCCTACCTGAACGCCGTCGTGGGCACCGCTCTGATCAAGAAGTATCC
TAAGCTGGAGAGCGAGTTCGTGTACGGCGACTACAAGGTGTACGACGTGCGGAAGATGATCG
CCAAGAGCGAGCAGGAGATCGGCAAGGCCACCGCCAAGTACTTCTTCTACTCCAATATCATG
AACTTCTTCAAGACCGAGATCACCCTGGCCAACGGGGAGATCCGGAAGCGCCCACTGATCGA
GACCAACGGCGAGACCGGCGAGATCGTGTGGGACAAGGGCAGGGACTTCGCCACCGTGAGGA
AGGTGCTGTCCATGCCCCAGGTGAACATCGTGAAAAAGACCGAGGTGCAGACCGGGGGGTTC
TCCAAGGAGAGCATCCTGCCCAAGGGCAACAGCGACAAGCTGATCGCCCGGAAGAAGGACTG
GGACCCCAAGAAGTACGGAGGCTTCATGTATCCTACCGTGGCCTACTCCGTGCTGGTGGTGG
CCAAGGTGGAGAAGGGCAAGTCCAAGAAGCTGAAGTCAGTGAAGGAGCTGCTGGGCATCACC
ATCATGGAGCGGTCTAGCTTCGAGAAGAATCCTATTGACTTCCTGGAGGCCAAGGGCTACAA
GGAGGTCAAGAAGGATCTGATCATCAAGCTGCCCAAGTACAGCCTGTTCGAGCTGGAGAATG
GCCGGAAGAGGATGCTGGCCAGCGCCAAGTTCCTGCAGAAGGGCAACGAGCTGGCCCTGCCC
AGCAAGTACGTGAACTTCCTCTATCTGGCCAGCCACTACGAGAAGCTGAAGGGCTCTCCAAA
GGACAACGAGCAGAAGCAGCTGTTCGTGGAGCAGCACAAGCACTACCTGGACGAGATCATCG
AGCAGATCTCCGAGTTCAGCAAGCGCGTGATCCTGGACGACGCCAACCTGGACAAGGTGCTG
TCCGCTTACAACAAGCACAGGGACAAGCCCATCAGGGAGCAGGCCGAGAACATCATCCACCT
GTTCACCCTGACCAACCTGGGCGCCCCCAGGGCCTTCAAGTACTTCGATACCACCATCGCCA
GGAAGGAGTACAGGAGTACTAAGGAGGTCCTGGATGCCACTCTGATCCACCAGAGCATCACC
GGGCTGTACGAGACCCGGATCGACCTGTCCCAGCTGGGCGGCGACGAGGGCGCCGACAAGCG
GACAGCCGACGGCAGCGAGTTCGAGAGCCCCAAGAAGAAGCGGAAGGTG

### Variant I Polynucleotide Sequence:

(SEQ ID NO: 459)
TCAGAAGTCGAGTTTAGCCACGAATATTGGATGCGCCACGCCCTCACCCTGGCCAAGAGAGC
CCGGGACGAGCGCGAGGTGCCCGTGGGCGCCGTCCTGGTGCACAACAACAGGGTGATCGGCG
AGGGCTGGAACCGGGCCATCGGCCTGCACGACCCCACAGCCCACGCCGAGATCATGGCCCTG
CGGCAGGGTGGCCTGGTCATGCAGAACTACAGGCTGTATGACGCCACCCTGTACACCACATT
CGAGCCCTGCGTGATGTGCGCCGGGGCCATGATCCACAGCCGGATCGGCCGCGTGGTGTTCG
GCGTGCGGAACGCCAAGACCGGCGCCGCCGGCAGCCTGATGGACGTTCTGCACTACCCCGGG
ATGAACCACAGGGTGGAGATCACAGAGGGCATCCTGGCAGACGAGTGCGCCGCCCTGCTGTG
CACTTTCTTCAGGATGCCCAGATCTGTGTTCAAGGCCCAGAAGAAGGCCCAGAGCTCCACCG
ACAAAGGCCCTAAGCCCAAGAAGGAAGAGAGCGAGAAGGACAAGAAGTACTCCATCGGCCTG
GCCATCGGCACCAACTCCGTGGGTTGGGCCGTGATCACCGATGAGTACAAGGTGCCCAGCAA
GAAGTTCAAGGTGCTGGGCAACACCGACAGGCACTCTATCAAGAAGAACCTGATCGGCGCCC
TGCTGTTCGACAGCGGGGAGACCGCTGAGGCCACTCGGCTGAAGAGAACCGCCAGGCGCAGA
TACACCCGGAGAAAGAACCGGATCTGCTACCTGCAGGAGATCTTCAGCAACGAGATGGCCAA
GGTGGACGACAGCTTCTTCCACAGGCTGGAGGAGAGCTTCCTGGTGGAGGAGGACAAGAAGC
ACGAGCGCCACCCCATCTTCGGCAACATCGTGGATGAGGTGGCCTACCACGAGAAGTACCCC
ACCATCTACCACCTGCGGAAGAAGCTGGTGGACAGCACCGATAAGGCCGATCTGCGGCTGAT
CTACCTGGCCCTGGCCCACATGATCAAGTTCAGGGGGCACTTCCTGATCGAGGGCGACCTGA
ACCCCGACAACTCCGATGTGGATAAACTGTTCATCCAGCTGGTGCAGACCTACAACCAGCTG
TTTGAGGAGAATCCCATCAACGCCTCCGGCGTGGACGCCAAGGCCATCCTGAGCGCCCGGCT
GTCCAAGAGCCGGAGGCTGGAGAATCTGATCGCCCAGCTGCCTGGCGAGAAGAAGAACGGCC
TGTTCGGCAACCTGATCGCCCTGAGCCTGGGCCTGACCCCCAATTTCAAGAGCAACTTCGAC
CTGGCCGAGGATGCTAAGCTGCAGCTGTCCAAGGACACCTACGACGATGACCTGGACAACCT
GCTGGCTCAGATCGGCGATCAGTACGCCGACCTGTTCCTGGCCGCCAAGAACCTGTCAGACG
CCATCCTGCTGTCTGACATTCTGCGGGTGAACACCGAGATCACCAAGGCCCCACTGTCCGCC
TCTATGGTGAAGAGGTACGATGAGCACCACCAGGACCTGACCCTGCTGAAGGCTCTGGTGCG
GCAGCAGCTGCCGGAGAAGTACAAGGAGATCTTCTTCGACCAGAGCAAGAACGGCTACGCCG
GCTACATCGACGGCGGGGCCAGCCAGGAGGAGTTCTACAAGTTCATCAAGCCTATCCTGGAG
AAGATGGACGGCACCGAGGAGCTGCTGGTGAAGCTGAACCGGGAGGACCTGCTGCGGAAGCA
GAGGACCTTCGACAACGGCATCATTCCCCACCAGATCCACCTGGGCGAGCTGCACGCCATCC
TGCGGAGGCAGGGCGACTTCTACCCTTTCCTGAAGGACAACAGGGAGAAGATCGAGAAGATC
CTGACCTTCAGGATCCCCTACTACGTGGGCCCCCTGGCCCGCGGCAACTCCCGCTTTGCCTG
GATGACCAGAAAGAGCGAGGAGACCATCACCCCTTGGAACTTCGAGGAGGTGGTGGACAAGG
GCGCCAGCGCCCAGAGCTTCATCGAGCGCATGACCAACTTCGACAAGAATCTGCCCAACGAG
AAGGTGCTGCCCAAGCACTCCCTGCTGTACGAGTACTTCACCGTGTACAACGAGCTGACAAA
GGTGAAGTACGTGACAGAGGGCATGCGCAAGCCCGCCTTCCTGTCTGGCGAGCAGAAGAAGG
CCATCGTGGACCTGCTGTTCAAGACCAACAGGAAGGTGACCGTGAAGCAGCTGAAGGAGGAC
TACTTCAAGAAGATCGAGTGCTTCGACAGCGTGGAGATCAGCGGCGTGGAGGACAGGTTCAA
CGCCAGCCTGGGCACCTACCACGACCTGCTGAAGATCATCAAGGACAAGGACTTCCTGGATA
ACGAGGAGAACGAGGATATCCTGGAGGACATTGTCCTGACCCTGACCCTGTTCGAGGATCGG
GAGATGATCGAGGAGCGCCTCAAGACCTACGCCCACCTGTTCGACGATAAGGTGATGAAGCA
GCTGAAGCGGCTGCGCTACACCGGCTGGGGCCGCCTGTCCCGGAAGCTGATCAACGGCATCC
GGGACAAGCAGTCCGGCAAGACCATCCTGGACTTCCTGAAGTCCGATGGTTTTGCCAACAGA
AACTTCATGCAGCTGATCCACGACGACAGCCTGACCTTCAAGGAGGACATCCAGAAGGCTCA
GGTGTCCGGACAGGGGGACTCCCTGCACGAGCACATCGCCAACCTGGCCGGCTCTCCCGCCA
TCAAGAAGGGCATCCTGCAGACCGTGAAGGTGGTGGACGAGCTGGTGAAGGTGATGGGCGGG
CACAAGCCCGAGAACATCGTGATCGAGATGGCCCGGGAGAACCAGACCACCCAGAAGGGCCA
GAAGAACAGCAGGGAGCGCATGAAGCGCATCGAGGAGGGCATCAAGGAGCTGGGTAGCCAGA
TCCTGAAGGAGCACCCTGTGGAGAATACCCAGCTGCAGAACGAGAAGCTGTATCTGTACTAC
CTGCAGAACGGCAGGGACATGTACGTGGATCAGGAGCTGGACATCAACCGGCTGTCTGACTA
CGACGTGGACCACATCGTGCCCCAGTCTTTCCTGAAGGACGACAGCATCGACAACAAGGTGC
TGACCCGCAGCGACAAGAACAGGGGCAAGAGCGATAACGTGCCCTCCGAGGAGGTGGTCAAG
AAGATGAAGAACTACTGGCGGCAGCTGCTGAACGCCAAGCTGATCACCCAGCGGAAGTTCGT
CAGAAGTCGAGTTTAGCCACGAATATTGGATGCGCCACGCCCTCACCCTGGCCAAGAGAGCC
CGGGACGAGCGCGAGGTGCCCGTGGGCGCCGTCCTGGTGCACAACAACAGGGTGATCGGCGA
GGGCTGGAACCGGGCCATCGGCCTGCACGACCCCACAGCCCACGCCGAGATCATGGCCCTGC
GGCAGGGTGGCCTGGTCATGCAGAACTACAGGCTGTATGACGCCACCCTGTACACCACATTC
GAGCCCTGCGTGATGTGCGCCGGGGCCATGATCCACAGCCGGATCGGCCGCGTGGTGTTCGG
CGTGCGGAACGCCAAGACCGGCGCCGCCGGCAGCCTGATGGACGTTCTGCACTACCCCGGGA
TGAACCACAGGGTGGAGATCACAGAGGGCATCCTGGCAGACGAGTGCGCCGCCCTGCTGTGC
ACTTTCTTCAGGATGCCCAGATCTGTGTTCAAGGCCCAGAAGAAGGCCCAGAGCTCCACCGA
CACAACCTGACCAAGGCCGAGAGAGGCGGCCTGTCCGAGCTGGACAAGGCCGGCTTCATCAA
GCGGCAGCTGGTGGAGACCCGGCAGATCACCAAGCACGTCGCCCAGATCCTGGACTCCAGGA
TGAACACCAAGTACGACGAGAACGACAAGCTGATCAGAGAGGTGAAGGTGATCACCCTGAAG
TCCAAGCTGGTGAGCGACTTCAGGAAGGATTTCCAGTTCTACAAGGTGCGGGAGATCAACAA
CTATCACCACGCCCACGACGCCTACCTGAACGCCGTCGTGGGCACCGCTCTGATCAAGAAGT
ATCCTAAGCTGGAGAGCGAGTTCGTGTACGGCGACTACAAGGTGTACGACGTGCGGAAGATG
ATCGCCAAGAGCGAGCAGGAGATCGGCAAGGCCACCGCCAAGTACTTCTTCTACTCCAATAT
CATGAACTTCTTCAAGACCGAGATCACCCTGGCCAACGGGGAGATCCGGAAGCGCCCACTGA
TCGAGACCAACGGCGAGACCGGCGAGATCGTGTGGGACAAGGGCAGGGACTTCGCCACCGTG
AGGAAGGTGCTGTCCATGCCCCAGGTGAACATCGTGAAAAAGACCGAGGTGCAGACCGGGGG
GTTCTCCAAGGAGAGCATCCTGCCCAAGGGCAACAGCGACAAGCTGATCGCCCGGAAGAAGG
ACTGGGACCCCAAGAAGTACGGAGGCTTCCTGTATCCTACCGTGGCCTACTCCGTGCTGGTG
GTGGCCAAGGTGGAGAAGGGCAAGTCCAAGAAGCTGAAGTCAGTGAAGGAGCTGCTGGGCAT
CACCATCATGGAGCGGTCTAGCTTCGAGAAGAATCCTATTGACTTCCTGGAGGCCAAGGGCT
ACAAGGAGGTCAAGAAGGATCTGATCATCAAGCTGCCCAAGTACAGCCTGTTCGAGCTGGAG
AATGGCCGGAAGAGGATGCTGGCCAGCGCCAAGTTCCTGCAGAAGGGCAACGAGCTGGCCCT
GCCCAGCAAGTACGTGAACTTCCTCTATCTGGCCAGCCACTACGAGAAGCTGAAGGGCTCTC
CAGAGGACAACGAGCAGAAGCAGCTGTTCGTGGAGCAGCACAAGCACTACCTGGACGAGATC
ATCGAGCAGATCTCCGAGTTCAGCAAGCGCGTGATCCTGGACGACGCCAACCTGGACAAGGT
GCTGTCCGCTTACAACAAGCACAGGGACAAGCCCATCAGGGAGCAGGCCGAGAACATCATCC
ACCTGTTCACCCTGACCAACCTGGGCGCCCCCAGGGCCTTCAAGTACTTCGATACCACCATC
GCCAGGAAGGAGTACAAAAGTACTAAGGAGGTCCTGGATGCCACTCTGATCCACCAGAGCAT
CACCGGGCTGTACGAGACCCGGATCGACCTGTCCCAGCTGGGCGGCGACGAGGGCGCCGACA
AGCGGACAGCCGACGGCAGCGAGTTCGAGAGCCCCAAGAAGAAGCGGAAGGTG

### Variant J Polynucleotide Sequence:

(SEQ ID NO: 460)
TCAGAAGTCGAGTTTAGCCACGAATATTGGATGCGCCACGCCCTCACCCTGGCCAAGAGAGC
CCGGGACGAGCGCGAGGTGCCCGTGGGCGCCGTCCTGGTGCACAACAACAGGGTGATCGGCG
AGGGCTGGAACCGGGCCATCGGCCTGCACGACCCCACAGCCCACGCCGAGATCATGGCCCTG
CGGCAGGGTGGCCTGGTCATGCAGAACTACAGGCTGTATGACGCCACCCTGTACACCACATT
CGAGCCCTGCGTGATGTGCGCCGGGGCCATGATCCACAGCCGGATCGGCCGCGTGGTGTTCG
GCGTGCGGAACGCCAAGACCGGCGCCGCCGGCAGCCTGATGGACGTTCTGCACTACCCCGGG
ATGAACCACAGGGTGGAGATCACAGAGGGCATCCTGGCAGACGAGTGCGCCGCCCTGCTGTG
CACTTTCTTCAGGATGCCCAGATCTGTGTTCAAGGCCCAGAAGAAGGCCCAGAGCTCCACCG
ACAGCGGCGGGAGCTCTGGGGGCTCCTCCGGGAGCGAGACCCCCGGGACCAGCGAGTCCGCC
ACCCCCGAGAGCAGCGGCGGCAGCTCCGGGGGGAGCGACAAGAAGTACTCCATCGGCCTGGC
CATCGGCACCAACTCCGTGGGTTGGGCCGTGATCACCGATGAGTACAAGGTGCCCAGCAAGA
AGTTCAAGGTGCTGGGCAACACCGACAGGCACTCTATCAAGAAGAACCTGATCGGCGCCCTG
CTGTTCGACAGCGGGGAGACCGCTGAGGCCACTCGGCTGAAGAGAACCGCCAGGCGCAGATA
CACCCGGAGAAAGAACCGGATCTGCTACCTGCAGGAGATCTTCAGCAACGAGATGGCCAAGG
TGGACGACAGCTTCTTCCACAGGCTGGAGGAGAGCTTCCTGGTGGAGGAGGACAAGAAGCAC
GAGCGCCACCCCATCTTCGGCAACATCGTGGATGAGGTGGCCTACCACGAGAAGTACCCCAC
CATCTACCACCTGCGGAAGAAGCTGGTGGACAGCACCGATAAGGCCGATCTGCGGCTGATCT
ACCTGGCCCTGGCCCACATGATCAAGTTCAGGGGGCACTTCCTGATCGAGGGCGACCTGAAC
CCCGACAACTCCGATGTGGATAAACTGTTCATCCAGCTGGTGCAGACCTACAACCAGCTGTT
TGAGGAGAATCCCATCAACGCCTCCGGCGTGGACGCCAAGGCCATCCTGAGCGCCCGGCTGT
CCAAGAGCCGGAGGCTGGAGAATCTGATCGCCCAGCTGCCTGGCGAGAAGAAGAACGGCCTG
TTCGGCAACCTGATCGCCCTGAGCCTGGGCCTGACCCCCAATTTCAAGAGCAACTTCGACCT
GGCCGAGGATGCTAAGCTGCAGCTGTCCAAGGACACCTACGACGATGACCTGGACAACCTGC
TGGCTCAGATCGGCGATCAGTACGCCGACCTGTTCCTGGCCGCCAAGAACCTGTCAGACGCC
ATCCTGCTGTCTGACATTCTGCGGGTGAACACCGAGATCACCAAGGCCCCACTGTCCGCCTC
TATGGTGAAGAGGTACGATGAGCACCACCAGGACCTGACCCTGCTGAAGGCTCTGGTGCGGC
AGCAGCTGCCGGAGAAGTACAAGGAGATCTTCTTCGACCAGAGCAAGAACGGCTACGCCGGC
TACATCGACGGCGGGGCCAGCCAGGAGGAGTTCTACAAGTTCATCAAGCCTATCCTGGAGAA
GATGGACGGCACCGAGGAGCTGCTGGTGAAGCTGAACCGGGAGGACCTGCTGCGGAAGCAGA
GGACCTTCGACAACGGCATCATTCCCCACCAGATCCACCTGGGCGAGCTGCACGCCATCCTG
CGGAGGCAGGGCGACTTCTACCCTTTCCTGAAGGACAACAGGGAGAAGATCGAGAAGATCCT
GACCTTCAGGATCCCCTACTACGTGGGCCCCCTGGCCCGCGGCAACTCCCGCTTTGCCTGGA
TGACCAGAAAGAGCGAGGAGACCATCACCCCTTGGAACTTCGAGGAGGTGGTGGACAAGGGC
GCCAGCGCCCAGAGCTTCATCGAGCGCATGACCAACTTCGACAAGAATCTGCCCAACGAGAA
GGTGCTGCCCAAGCACTCCCTGCTGTACGAGTACTTCACCGTGTACAACGAGCTGACAAAGG
TGAAGTACGTGACAGAGGGCATGCGCAAGCCCGCCTTCCTGTCTGGCGAGCAGAAGAAGGCC
ATCGTGGACCTGCTGTTCAAGACCAACAGGAAGGTGACCGTGAAGCAGCTGAAGGAGGACTA
CTTCAAGAAGATCGAGTGCTTCGACAGCGTGGAGATCAGCGGCGTGGAGGACAGGTTCAACG
CCAGCCTGGGCACCTACCACGACCTGCTGAAGATCATCAAGGACAAGGACTTCCTGGATAAC
GAGGAGAACGAGGATATCCTGGAGGACATTGTCCTGACCCTGACCCTGTTCGAGGATCGGGA
GATGATCGAGGAGCGCCTCAAGACCTACGCCCACCTGTTCGACGATAAGGTGATGAAGCAGC
TGAAGCGGCTGCGCTACACCGGCTGGGGCCGCCTGTCCCGGAAGCTGATCAACGGCATCCGG
GACAAGCAGTCCGGCAAGACCATCCTGGACTTCCTGAAGTCCGATGGTTTTGCCAACAGAAA
CTTCATGCAGCTGATCCACGACGACAGCCTGACCTTCAAGGAGGACATCCAGAAGGCTCAGG
TGTCCGGACAGGGGGACTCCCTGCACGAGCACATCGCCAACCTGGCCGGCTCTCCCGCCATC
AAGAAGGGCATCCTGCAGACCGTGAAGGTGGTGGACGAGCTGGTGAAGGTGATGGGCGGGCA
CAAGCCCGAGAACATCGTGATCGAGATGGCCGCTGAGAACGCCACCACCCAGAAGGGCCAGA
AGAACAGCAGGGAGCGCATGAAGCGCATCGAGGAGGGCATCAAGGAGCTGGGTAGCCAGATC
CTGAAGGAGCACCCTGTGGAGAATACCCAGCTGCAGAACGAGAAGCTGTATCTGTACTACCT
GCAGAACGGCAGGGACATGTACGTGGATCAGGAGCTGGACATCAACCGGCTGTCTGACTACG
ACGTGGACCACATCGTGCCCCAGTCTTTCCTGAAGGACGACAGCATCGACAACAAGGTGCTG
ACCCGCAGCGACAAGAACAGGGGCAAGAGCGATAACGTGCCCTCCGAGGAGGTGGTCAAGAA
GATGAAGAACTACTGGCGGCAGCTGCTGAACGCCAAGCTGATCACCCAGCGGAAGTTCGACA
ACCTGACCAAGGCCGAGAGAGGCGGCCTGTCCGAGCTGGACAAGGCCGGCTTCATCAAGCGG
CAGCTGGTGGAGACCCGGCAGATCACCAAGCACGTCGCCCAGATCCTGGACTCCAGGATGAA
CACCAAGTACGACGAGAACGACAAGCTGATCAGAGAGGTGAAGGTGATCACCCTGAAGTCCA
AGCTGGTGAGCGACTTCAGGAAGGATTTCCAGTTCTACAAGGTGCGGGAGATCAACAACTAT
CACCACGCCCACGACGCCTACCTGAACGCCGTCGTGGGCACCGCTCTGATCAAGAAGTATCC
TAAGCTGGAGAGCGAGTTCGTGTACGGCGACTACAAGGTGTACGACGTGCGGAAGATGATCG
CCAAGAGCGAGCAGGAGATCGGCAAGGCCACCGCCAAGTACTTCTTCTACTCCAATATCATG
AACTTCTTCAAGACCGAGATCACCCTGGCCAACGGGGAGATCCGGAAGCGCCCACTGATCGA
GACCAACGGCGAGACCGGCGAGATCGTGTGGGACAAGGGCAGGGACTTCGCCACCGTGAGGA
AGGTGCTGTCCATGCCCCAGGTGAACATCGTGAAAAAGACCGAGGTGCAGACCGGGGGGTTC
TCCAAGGAGAGCATCCTGCCCAAGGGCAACAGCGACAAGCTGATCGCCCGGAAGAAGGACTG
GGACCCCAAGAAGTACGGAGGCTTCCTGTATCCTACCGTGGCCTACTCCGTGCTGGTGGTGG
CCAAGGTGGAGAAGGGCAAGTCCAAGAAGCTGAAGTCAGTGAAGGAGCTGCTGGGCATCACC
ATCATGGAGCGGTCTAGCTTCGAGAAGAATCCTATTGACTTCCTGGAGGCCAAGGGCTACAA
GGAGGTCAAGAAGGATCTGATCATCAAGCTGCCCAAGTACAGCCTGTTCGAGCTGGAGAATG
GCCGGAAGAGGATGCTGGCCAGCGCCAAGTTCCTGCAGAAGGGCAACGAGCTGGCCCTGCCC
AGCAAGTACGTGAACTTCCTCTATCTGGCCAGCCACTACGAGAAGCTGAAGGGCTCTCCAGA
GGACAACGAGCAGAAGCAGCTGTTCGTGGAGCAGCACAAGCACTACCTGGACGAGATCATCG
AGCAGATCTCCGAGTTCAGCAAGCGCGTGATCCTGGACGACGCCAACCTGGACAAGGTGCTG
TCCGCTTACAACAAGCACAGGGACAAGCCCATCAGGGAGCAGGCCGAGAACATCATCCACCT
GTTCACCCTGACCAACCTGGGCGCCCCCAGGGCCTTCAAGTACTTCGATACCACCATCGCCA
GGAAGGAGTACAAAAGTACTAAGGAGGTCCTGGATGCCACTCTGATCCACCAGAGCATCACC
GGGCTGTACGAGACCCGGATCGACCTGTCCCAGCTGGGCGGCGACGAGGGCGCCGACAAGCG
GACAGCCGACGGCAGCGAGTTCGAGAGCCCCAAGAAGAAGCGGAAGGTG

### Variant K Polynucleotide Sequence:

(SEQ ID NO: 461)
TCAGAAGTCGAGTTTAGCCACGAATATTGGATGCGCCACGCCCTCACCCTGGCCAAGAGAGC
CCGGGACGAGCGCGAGGTGCCCGTGGGCGCCGTCCTGGTGCACAACAACAGGGTGATCGGCG
AGGGCTGGAACCGGGCCATCGGCCTGCACGACCCCACAGCCCACGCCGAGATCATGGCCCTG
CGGCAGGGTGGCCTGGTCATGCAGAACTACAGGCTGTATGACGCCACCCTGTACACCACATT
CGAGCCCTGCGTGATGTGCGCCGGGGCCATGATCCACAGCCGGATCGGCCGCGTGGTGTTCG
GCGTGCGGAACGCCAAGACCGGCGCCGCCGGCAGCCTGATGGACGTTCTGCACTACCCCGGG
ATGAACCACAGGGTGGAGATCACAGAGGGCATCCTGGCAGACGAGTGCGCCGCCCTGCTGTG
CACTTTCTTCAGGATGCCCAGATCTGTGTTCAAGGCCCAGAAGAAGGCCCAGAGCTCCACCG
ACAAAGGCCCTAAGCCCAAGAAGGAAGAGAGCGAGAAGGACAAGAAGTACTCCATCGGCCTG
GCCATCGGCACCAACTCCGTGGGTTGGGCCGTGATCACCGATGAGTACAAGGTGCCCAGCAA
GAAGTTCAAGGTGCTGGGCAACACCGACAGGCACTCTATCAAGAAGAACCTGATCGGCGCCC
TGCTGTTCGACAGCGGGGAGACCGCTGAGGCCACTCGGCTGAAGAGAACCGCCAGGCGCAGA
TACACCCGGAGAAAGAACCGGATCTGCTACCTGCAGGAGATCTTCAGCAACGAGATGGCCAA
GGTGGACGACAGCTTCTTCCACAGGCTGGAGGAGAGCTTCCTGGTGGAGGAGGACAAGAAGC
ACGAGCGCCACCCCATCTTCGGCAACATCGTGGATGAGGTGGCCTACCACGAGAAGTACCCC
ACCATCTACCACCTGCGGAAGAAGCTGGTGGACAGCACCGATAAGGCCGATCTGCGGCTGAT
CTACCTGGCCCTGGCCCACATGATCAAGTTCAGGGGGCACTTCCTGATCGAGGGCGACCTGA
ACCCCGACAACTCCGATGTGGATAAACTGTTCATCCAGCTGGTGCAGACCTACAACCAGCTG
TTTGAGGAGAATCCCATCAACGCCTCCGGCGTGGACGCCAAGGCCATCCTGAGCGCCCGGCT
GTCCAAGAGCCGGAGGCTGGAGAATCTGATCGCCCAGCTGCCTGGCGAGAAGAAGAACGGCC
TGTTCGGCAACCTGATCGCCCTGAGCCTGGGCCTGACCCCCAATTTCAAGAGCAACTTCGAC
CTGGCCGAGGATGCTAAGCTGCAGCTGTCCAAGGACACCTACGACGATGACCTGGACAACCT
GCTGGCTCAGATCGGCGATCAGTACGCCGACCTGTTCCTGGCCGCCAAGAACCTGTCAGACG
CCATCCTGCTGTCTGACATTCTGCGGGTGAACACCGAGATCACCAAGGCCCCACTGTCCGCC
TCTATGGTGAAGAGGTACGATGAGCACCACCAGGACCTGACCCTGCTGAAGGCTCTGGTGCG
GCAGCAGCTGCCGGAGAAGTACAAGGAGATCTTCTTCGACCAGAGCAAGAACGGCTACGCCG
GCTACATCGACGGCGGGGCCAGCCAGGAGGAGTTCTACAAGTTCATCAAGCCTATCCTGGAG
AAGATGGACGGCACCGAGGAGCTGCTGGTGAAGCTGAACCGGGAGGACCTGCTGCGGAAGCA
GAGGACCTTCGACAACGGCATCATTCCCCACCAGATCCACCTGGGCGAGCTGCACGCCATCC
TGCGGAGGCAGGGCGACTTCTACCCTTTCCTGAAGGACAACAGGGAGAAGATCGAGAAGATC
CTGACCTTCAGGATCCCCTACTACGTGGGCCCCCTGGCCCGCGGCAACTCCCGCTTTGCCTG
GATGACCAGAAAGAGCGAGGAGACCATCACCCCTTGGAACTTCGAGGAGGTGGTGGACAAGG
GCGCCAGCGCCCAGAGCTTCATCGAGCGCATGACCAACTTCGACAAGAATCTGCCCAACGAG
AAGGTGCTGCCCAAGCACTCCCTGCTGTACGAGTACTTCACCGTGTACAACGAGCTGACAAA
GGTGAAGTACGTGACAGAGGGCATGCGCAAGCCCGCCTTCCTGTCTGGCGAGCAGAAGAAGG
CCATCGTGGACCTGCTGTTCAAGACCAACAGGAAGGTGACCGTGAAGCAGCTGAAGGAGGAC
TACTTCAAGAAGATCGAGTGCTTCGACAGCGTGGAGATCAGCGGCGTGGAGGACAGGTTCAA
CGCCAGCCTGGGCACCTACCACGACCTGCTGAAGATCATCAAGGACAAGGACTTCCTGGATA
ACGAGGAGAACGAGGATATCCTGGAGGACATTGTCCTGACCCTGACCCTGTTCGAGGATCGG
GAGATGATCGAGGAGCGCCTCAAGACCTACGCCCACCTGTTCGACGATAAGGTGATGAAGCA
GCTGAAGCGGCTGCGCTACACCGGCTGGGGCCGCCTGTCCCGGAAGCTGATCAACGGCATCC
GGGACAAGCAGTCCGGCAAGACCATCCTGGACTTCCTGAAGTCCGATGGTTTTGCCAACAGA
AACTTCATGCAGCTGATCCACGACGACAGCCTGACCTTCAAGGAGGACATCCAGAAGGCTCA
GGTGTCCGGACAGGGGGACTCCCTGCACGAGCACATCGCCAACCTGGCCGGCTCTCCCGCCA
TCAAGAAGGGCATCCTGCAGACCGTGAAGGTGGTGGACGAGCTGGTGAAGGTGATGGGCGGG
CACAAGCCCGAGAACATCGTGATCGAGATGGCCCGGGAGAACCAGACCACCCAGAAGGGCCA
GAAGAACAGCAGGGAGCGCATGAAGCGCATCGAGGAGGGCATCAAGGAGCTGGGTAGCCAGA
TCCTGAAGGAGCACCCTGTGGAGAATACCCAGCTGCAGAACGAGAAGCTGTATCTGTACTAC
CTGCAGAACGGCAGGGACATGTACGTGGATCAGGAGCTGGACATCAACCGGCTGTCTGACTA
CGACGTGGACCACATCGTGCCCCAGTCTTTCCTGAAGGACGACAGCATCGACAACAAGGTGC
TGACCCGCAGCGACAAGAACAGGGGCAAGAGCGATAACGTGCCCTCCGAGGAGGTGGTCAAG
AAGATGAAGAACTACTGGCGGCAGCTGCTGAACGCCAAGCTGATCACCCAGCGGAAGTTCGA
CAACCTGACCAAGGCCGAGAGAGGCGGCCTGTCCGAGCTGGACAAGGCCGGCTTCATCAAGC
GGCAGCTGGTGGAGACCCGGCAGATCACCAAGCACGTCGCCCAGATCCTGGACTCCAGGATG
AACACCAAGTACGACGAGAACGACAAGCTGATCAGAGAGGTGAAGGTGATCACCCTGAAGTC
CAAGCTGGTGAGCGACTTCAGGAAGGATTTCCAGTTCTACAAGGTGCGGGAGATCAACAACT
ATCACCACGCCCACGACGCCTACCTGAACGCCGTCGTGGGCACCGCTCTGATCAAGAAGTAT
CCTAAGCTGGAGAGCGAGTTCGTGTACGGCGACTACAAGGTGTACGACGTGCGGAAGATGAT
CGCCAAGAGCGAGCAGGAGATCGGCAAGGCCACCGCCAAGTACTTCTTCTACTCCAATATCA
TGAACTTCTTCAAGACCGAGATCACCCTGGCCAACGGGGAGATCCGGAAGCGCCCACTGATC
GAGACCAACGGCGAGACCGGCGAGATCGTGTGGGACAAGGGCAGGGACTTCGCCACCGTGAG
GAAGGTGCTGTCCATGCCCCAGGTGAACATCGTGAAAAAGACCGAGGTGCAGACCGGGGGGT
TCTCCAAGGAGAGCATCCTGCCCAAGGGCAACAGCGACAAGCTGATCGCCCGGAAGAAGGAC
TGGGACCCCAAGAAGTACGGAGGCTTCATGTATCCTACCGTGGCCTACTCCGTGCTGGTGGT
GGCCAAGGTGGAGAAGGGCAAGTCCAAGAAGCTGAAGTCAGTGAAGGAGCTGCTGGGCATCA
CCATCATGGAGCGGTCTAGCTTCGAGAAGAATCCTATTGACTTCCTGGAGGCCAAGGGCTAC
AAGGAGGTCAAGAAGGATCTGATCATCAAGCTGCCCAAGTACAGCCTGTTCGAGCTGGAGAA
TGGCCGGAAGAGGATGCTGGCCAGCGCCAAGTTCCTGCAGAAGGGCAACGAGCTGGCCCTGC
CCAGCAAGTACGTGAACTTCCTCTATCTGGCCAGCCACTACGAGAAGCTGAAGGGCTCTCCA
AAGGACAACGAGCAGAAGCAGCTGTTCGTGGAGCAGCACAAGCACTACCTGGACGAGATCAT
CGAGCAGATCTCCGAGTTCAGCAAGCGCGTGATCCTGGACGACGCCAACCTGGACAAGGTGC
TGTCCGCTTACAACAAGCACAGGGACAAGCCCATCAGGGAGCAGGCCGAGAACATCATCCAC
CTGTTCACCCTGACCAACCTGGGCGCCCCCAGGGCCTTCAAGTACTTCGATACCACCATCGC
CAGGAAGGAGTACAGGAGTACTAAGGAGGTCCTGGATGCCACTCTGATCCACCAGAGCATCA
CCGGGCTGTACGAGACCCGGATCGACCTGTCCCAGCTGGGCGGCGACGAGGGCGCCGACAAG
CGGACAGCCGACGGCAGCGAGTTCGAGAGCCCCAAGAAGAAGCGGAAGGTG.

[0222] In some embodiments, the ABE variants provided herein comprise the following arrangement of proteins (From N-terminus to C-terminus): [adenosine deaminase]-[optional linker]-[Cas9 domain]-[optional NLS].

[0223] In some embodiments, the arrangement of proteins of an ABE variant is [TadA*7.10 (L36H, I76Y, V82T, Y147T, Q154S, and N157K)]-[optional linker]-[SpCas9-MQKFRAER nickase]-[optional NLS]. In some embodiments the ABE variant is any one of the following ABE variants (i.e., ABE Variants A-K):

Variant A:
[TadA*7.10 (L36H, 176Y, V82T, Y147T, Q154S, and N157K)]-
[SGGSSGGSSGSETPGTSESATPESSGGSSGGS (SEQ ID NO: 357)]-[SpCas9-MQKFRAER
nickase R1337K]-[EGADKRTADGSEFESPKKKRKV (SEQ ID NO: 438)]
Variant B:
[TadA*7.10 (L36H, I76Y, V82T, Y147T, Q154S, and N157K)]-
[SGGSSGGSSGSETPGTSESATPESSGGSSGGS (SEQ ID NO: 357)]-[SpCas9-
MQKFRAER nickase Q1136Y, and R1337K]-[EGADKRTADGSEFESPKKKRK
V (SEQ ID NO: 438)]
Variant C:
[TadA*7.10 (L36H, 176Y, V82T, Y147T, Q154S, and N157K)]-
[EGGSEEEEESGS (SEQ ID NO: 432)]-[SpCas9-MQKFRAER nickase
M1135L, Q1136Y, and R1337K]-[EGADKRTADGSEFESPKKKRK
V (SEQ ID NO: 438)]
Variant D:
[TadA*7.10 (L36H, I76Y, V82T, Y147T, Q154S, and N157K)]-
[EGGSEEEEESGS (SEQ ID NO: 432)]-[SpCas9-MQKFRAER nickase
Q1136Y, and R1337K]-[EGADKRTADGSEFESPKKKRKV (SEQ ID NO: 438)]
Variant E:
[TadA*7.10 (L36H, I76Y, V82T, Y147T, Q154S, and N157K)]-
[KGPKPKKEESEK (SEQ ID NO: 439)]-[SpCas9-MQKFRAER nickase M1135L,
Q1136Y, and R1337K]-[EGADKRTADGSEFESPKKKRKV (SEQ ID NO: 438)]
Variant F:
[TadA*7.10 (L36H, I76Y, V82T, Y147T, Q154S, and N157K)]-
[SGGSSGGSSGSETPGTSESATPESSGGSSGGS (SEQ ID NO: 357)]-[SpCas9-
MQKFRAER nickase M1135L, A1283D, Q1136Y, and R1337K]-
[EGADKRTADGSEFESPKKKRKV (SEQ ID NO: 438)]
Variant G:
[TadA*7.10 (L36H, I76Y, V82T, Y147T, Q154S, and N157K)]-
[SGGSSGGSSGSETPGTSESATPESSGGSSGGS (SEQ ID NO: 357)]-[SpCas9-
MQKFRAER nickase M1135L, A1283D, E1250K, and R1337K]-
[EGADKRTADGSEFESPKKKRKV (SEQ ID NO: 438)]
Variant H:
[TadA*7.10 (L36H, I76Y, V82T, Y147T, Q154S, and N157K)]-
[SGGSSGGSSGSETPGTSESATPESSGGSSGGS (SEQ ID NO: 357)]-[SpCas9-
MQKFRAER nickase A1283D, E1250K, and Q1136Y]-[EGADKRTADGSEFES
PKKKRKV (SEQ ID NO: 438)]
Variant I:
[TadA*7.10 (L36H, I76Y, V82T, Y147T, Q154S, and N157K)]-
[KGPKPKKEESEK (SEQ ID NO: 439)]-[SpCas9-MQKFRAER nickase M1135L,
A1283D, Q1136Y, and R1337K]-[EGADKRTADGSEFESPKKKRK
V (SEQ ID NO: 438)]
Variant J:
[TadA*7.10 (L36H, I76Y, V82T, Y147T, Q154S, and N157K)]-
[SGGSSGGSSGSETPGTSESATPESSGGSSGGS (SEQ ID NO: 357)]-[SpCas9-
MQKFRAER nickase M1135L, A1283D, Q1136Y, R1337K, R765A, and
Q768A]-[EGADKRTADGSEFESPKKKRKV (SEQ ID NO: 438)]
Variant K:
[TadA*7.10 (L36H, I76Y, V82T, Y147T, Q154S, and N157K)]-
[KGPKPKKEESEK (SEQ ID NO: 439)]-[SpCas9-MQKFRAER nickase A1283D,
E1250K, and Q1136Y]-[EGADKRTADGSEFESPKKKRKV (SEQ ID NO: 438)]

[0224] In some embodiments the ABE Variant is ABE Variant G. In some embodiments, the ABE Variant is ABE Variant A, ABE Variant B, ABE Variant C, ABE Variant D, ABE Variant E, ABE Variant F, ABE Variant G, ABE Variant H, ABE Variant I, ABE Variant J, or ABE Variant K. In embodiments, an ABE variant comprises an amino acid sequence with at least about 85% sequence identity to an amino acid sequence of any one of ABE Variants A-K or comprises an amino acid sequence with at least 85% sequence identity to a deaminase, linker, and/or napDNAbp amino acid sequence of any one of ABE Variants A-K.

### Polynucleotide Programmable Nucleotide Binding Domain

[0225] Some aspects of the disclosure provide polynucleotide programmable nucleotide binding domains, and novel variants thereof. Such polynucleotide programmable nucleotide binding proteins, such as Cas9 proteins or variants thereof, may be part of a base editor or base editor system. In some embodiments, the polynucleotide programmable nucleotide binding protein is a Cas9 protein, or variant thereof. Non-limiting, exemplary Cas9 domains are provided herein. The Cas9 domain may be a nuclease active Cas9 domain, a nuclease inactive Cas9 domain (dCas9), or a Cas9 nickase (nCas9). In some embodiments, the Cas9 domain is a nuclease active domain. For example, the Cas9 domain may be a Cas9 domain that cuts both strands of a duplexed nucleic acid (e.g., both strands of a duplexed DNA molecule). In some embodiments, the Cas9 domain comprises any one of the amino acid sequences as set forth herein. In some embodiments the Cas9 domain comprises an amino acid sequence that is at least 60%, at least 65%, at least 70%, at least 75%, at least 80%, at least 85%, at least 90%, at least 95%, at least 96%, at least 97%, at least 98%, at least 99%, or at least 99.5% identical to any one of the amino acid sequences set forth herein. In some embodiments, the Cas9 domain comprises an amino acid sequence that has 1, 2, 3, 4, 5, 6, 7, 8, 9, 10, 11, 12, 13, 14, 15, 16, 17, 18, 19, 20, 21, 22, 21, 24, 25, 26, 27, 28, 29, 30, 31, 32, 33, 34, 35, 36, 37, 38, 39, 40, 41, 42, 43, 44, 45, 46, 47, 48, 49, 50 or more or more mutations compared to any one of the amino acid sequences set forth herein. In some embodiments, the Cas9 domain comprises an amino acid sequence that has at least 10, at least 15, at least 20, at least 30, at least 40, at least 50, at least 60, at least 70, at least 80, at least 90, at least 100, at least 150, at least 200, at least 250, at least 300, at least 350, at least 400, at least 500, at least 600, at least 700, at least 800, at least 900, at least 1000, at least 1100, or at least 1200 identical contiguous amino acid residues as compared to any one of the amino acid sequences set forth herein.

[0226] In some embodiments, proteins comprising fragments of Cas9 are provided. For example, in some embodiments, a protein comprises one of two Cas9 domains: (1) the gRNA binding domain of Cas9; or (2) the DNA cleavage domain of Cas9. In some embodiments, proteins comprising Cas9 or fragments thereof are referred to as “Cas9 variants.” A Cas9 variant shares homology to Cas9, or a fragment thereof. For example, a Cas9 variant is at least about 70% identical, at least about 80% identical, at least about 90% identical, at least about 95% identical, at least about 96% identical, at least about 97% identical, at least about 98% identical, at least about 99% identical, at least about 99.5% identical, or at least about 99.9% identical to wild-type Cas9. In some embodiments, the Cas9 variant may have 1, 2, 3, 4, 5, 6, 7, 8, 9, 10, 11, 12, 13, 14, 15, 16, 17, 18, 19, 20, 21, 22, 21, 24, 25, 26, 27, 28, 29, 30, 31, 32, 33, 34, 35, 36, 37, 38, 39, 40, 41, 42, 43, 44, 45, 46, 47, 48, 49, 50 or more amino acid changes compared to wild-type Cas9. In some embodiments, the Cas9 variant comprises a fragment of Cas9 (e.g., a gRNA binding domain or a DNA-cleavage domain), such that the fragment is at least about 70% identical, at least about 80% identical, at least about 90% identical, at least about 95% identical, at least about 96% identical, at least about 97% identical, at least about 98% identical, at least about 99% identical, at least about 99.5% identical, or at least about 99.9% identical to the corresponding fragment of wild-type Cas9. In some embodiments, the fragment is at least 30%, at least 35%, at least 40%, at least 45%, at least 50%, at least 55%, at least 60%, at least 65%, at least 70%, at least 75%, at least 80%, at least 85%, at least 90%, at least 95% identical, at least 96%, at least 97%, at least 98%, at least 99%, or at least 99.5% of the amino acid length of a corresponding wild-type Cas9. In some embodiments, the fragment is at least 100 amino acids in length. In some embodiments, the fragment is at least 100, 150, 200, 250, 300, 350, 400, 450, 500, 550, 600, 650, 700, 750, 800, 850, 900, 950, 1000, 1050, 1100, 1150, 1200, 1250, or at least 1300 amino acids in length.

[0227] In some embodiments, the disclosure provides a modified SpCas9, including amino acid substitutions D1135M, S1136Q, G1218K, E1219F, A1322R, D1332A, R1335E, and T1337R (SpCas9-MQKFRAER), which are indicated in bold-underlined text in the following SpCas9-MQKFRAER amino acid sequence. In some embodiments, the SpCas9-MQKFRAER is a nickase (e.g., the SpCas9-MQKFRAER polynucleotide may contain a G10A alteration, where a G10A alteration is indicated by underlined text in the below SpCas9-MQKFRAER amino acid sequence). In some embodiments, the modified SpCas9 has specificity for the altered PAM 5′-NGC-3′. In embodiments, an SpCas9 polypeptide of the disclosure has at least 85% sequence identity to the following amino acid sequence and is capable of functioning as a nucleic acid programmable DNA binding protein (napDNAbp). SpCas9-MQKFRAER amino acid sequence:

(SpCas9-MQKFRAER nickase, SEQ ID NO: 462)
MDKKYSIGLAIGTNSVGWAVITDEYKVPSKKFKVLGNTDRHSIKKNLIGALLFDSGETAEAT
RLKRTARRRYTRRKNRICYLQEIFSNEMAKVDDSFFHRLEESFLVEEDKKHERHPIFGNIVD
EVAYHEKYPTIYHLRKKLVDSTDKADLRLIYLALAHMIKFRGHFLIEGDLNPDNSDVDKLFI
QLVQTYNQLFEENPINASGVDAKAILSARLSKSRRLENLIAQLPGEKKNGLFGNLIALSLGL
TPNFKSNFDLAEDAKLQLSKDTYDDDLDNLLAQIGDQYADLFLAAKNLSDAILLSDILRVNT
EITKAPLSASMVKRYDEHHQDLTLLKALVRQQLPEKYKEIFFDQSKNGYAGYIDGGASQEEF
YKFIKPILEKMDGTEELLVKLNREDLLRKORTFDNGIIPHQIHLGELHAILRRQGDFYPFLK
DNREKIEKILTFRIPYYVGPLARGNSRFAWMTRKSEETITPWNFEEVVDKGASAQSFIERMT
NFDKNLPNEKVLPKHSLLYEYFTVYNELTKVKYVTEGMRKPAFLSGEQKKAIVDLLFKTNRK
VTVKQLKEDYFKKIECFDSVEISGVEDRFNASLGTYHDLLKIIKDKDFLDNEENEDILEDIV
LTLTLFEDREMIEERLKTYAHLFDDKVMKQLKRLRYTGWGRLSRKLINGIRDKQSGKTILDF
LKSDGFANRNFMQLIHDDSLTFKEDIQKAQVSGQGDSLHEHIANLAGSPAIKKGILQTVKVV
DELVKVMGGHKPENIVIEMARENQTTQKGQKNSRERMKRIEEGIKELGSQILKEHPVENTQL
QNEKLYLYYLQNGRDMYVDQELDINRLSDYDVDHIVPQSFLKDDSIDNKVLTRSDKNRGKSD
NVPSEEVVKKMKNYWRQLLNAKLITQRKFDNLTKAERGGLSELDKAGFIKRQLVETRQITKH
VAQILDSRMNTKYDENDKLIREVKVITLKSKLVSDFRKDFQFYKVREINNYHHAHDAYLNAV
VGTALIKKYPKLESEFVYGDYKVYDVRKMIAKSEQEIGKATAKYFFYSNIMNFFKTEITLAN
GEIRKRPLIETNGETGEIVWDKGRDFATVRKVLSMPQVNIVKKTEVQTGGFSKESILPKGNS
DKLIARKKDWDPKKYGGFMQPTVAYSVLVVAKVEKGKSKKLKSVKELLGITIMERSSFEKNP
IDFLEAKGYKEVKKDLIIKLPKYSLFELENGRKRMLASAKFLQKGNELALPSKYVNFLYLAS
HYEKLKGSPEDNEQKQLFVEQHKHYLDEIIEQISEFSKRVILADANLDKVLSAYNKHRDKPI
REQAENIIHLFTLTNLGAPRAFKYFDTTIARKEYRSTKEVLDATLIHQSITGLYETRIDLSQ
LGGD.

In the interest of clarity, amino acid substitutions D1135M, S1136Q, G1218K, E1219F, A1322R, D1332A, R1335E, and T1337R as compared to wild-type SpCas9 are indicated in the above sequence using bold and underlining. Amino acid substitution D10A, as compared to wild-type SpCas9 is indicated using underlining. In some embodiments, the SpCas9-MQKFRAER nickase does not comprise an N-terminal methionine.

[0228] In some embodiments, the disclosure provides novel Cas9 protein variants. In some embodiments, the disclosure provides novel SpCas9 variants. It should be appreciated that any of the Cas9 amino acid mutations disclosed herein may be made in any of the Cas9 protein provided herein. In some embodiments, any of the Cas9 proteins provided herein, including an SpCas9, a Hi-Fi Cas9, an SpCas9-MQKFRAER, or anSpCas9-MQKFRAER nickase comprises any one, two, three, four, five, six, seven, eight, nine, or ten of the following amino acid substitutions in a corresponding residue: W1126R, R1359W, E1250K, A1239T, A1239V, E1335D, M1135L, M1135R, M1135W, Q1136H, Q1136Y, K1218D, K1218R, K1218E, K1218L, F1219K, F1219N, R1322A, R1322K, R1337K, R1337T, and M1135V. In some embodiments an SpCas9-MQKFRAER nickase comprises any one of the following amino acid substitutions: W1126R, R1359W, E1250K, A1239T, A1239V, E1335D, M1135L, M1135R, M1135W, Q1136H, Q1136Y, K1218D, K1218R, K1218E, K1218L, F1219K, F1219N, R1322A, R1322K, R1337K, R1337T, and M1135V.

[0229] In some embodiments, any of the Cas9 proteins provided herein, including an SpCas9, a Hi-Fi Cas9, an SpCas9-MQKFRAER, or anSpCas9-MQKFRAER nickase comprises any two of the following amino acid substitutions in a corresponding residue: W1126R, R1359W, E1250K, A1239T, A1239V, E1335D, M1135L, M1135R, M1135W, Q1136H, Q1136Y, K1218D, K1218R, K1218E, K1218L, F1219K, F1219N, R1322A, R1322K, R1337K, R1337T, and M1135V. In some embodiments, the two amino acid substitutions are M1135L and Q1136H; M1135R and Q1136H; M1135L and Q1136Y; M1135R and Q1136Y; K1218D and F1219K; K1218R and F1219K; or E1335D and R1337K. In some embodiments an SpCas9-MQKFRAER nickase comprises any two of the following amino acid substitutions: W1126R, R1359W, E1250K, A1239T, A1239V, E1335D, M1135L, M1135R, M1135W, Q1136H, Q1136Y, K1218D, K1218R, K1218E, K1218L, F1219K, F1219N, R1322A, R1322K, R1337K, R1337T, and M1135V. In some embodiments, the two amino acid substitutions are M1135L and Q1136H; M1135R and Q1136H; M1135L and Q1136Y; M1135R and Q1136Y; K1218D and F1219K; K1218R and F1219K; Q1136Y and R1337K, or E1335D and R1337K.

[0230] In some embodiments, any of the Cas9 proteins provided herein, including an SpCas9, a Hi-Fi Cas9, an SpCas9-MQKFRAER, or anSpCas9-MQKFRAER nickase comprises any six of the following amino acid substitutions in a corresponding residue: W1126R, R1359W, E1250K, A1239T, A1239V, E1335D, M1135L, M1135R, M1135W, Q1136H, Q1136Y, K1218D, K1218R, K1218E, K1218L, F1219K, F1219N, R1322A, R1322K, R1337K, R1337T, and M1135V. In some embodiments, the six amino acid substitutions are M1135R, Q1136H, K1218D, R1322K, E1335D, and R1337K; or M1135V, Q1136H, K1218D, R1322K, E1335D, and R1337K. In some embodiments an SpCas9-MQKFRAER nickase comprises any six of the following amino acid substitutions: W1126R, R1359W, E1250K, A1239T, A1239V, E1335D, M1135L, M1135R, M1135W, Q1136H, Q1136Y, K1218D, K1218R, K1218E, K1218L, F1219K, F1219N, R1322A, R1322K, R1337K, R1337T, and M1135V. In some embodiments, the six amino acid substitutions are M1135R, Q1136H, K1218D, R1322K, E1335D, and R1337K; or M1135V, Q1136H, K1218D, R1322K, E1335D, and R1337K.

[0231] In some embodiments, the disclosure provides novel Cas9 protein variants. In some embodiments, the disclosure provides novel SpCas9 variants. It should be appreciated that any of the Cas9 amino acid mutations disclosed herein may be made in any of the Cas9 protein provided herein. In some embodiments, any of the Cas9 proteins provided herein, including an SpCas9, a Hi-Fi Cas9, an SpCas9-MQKFRAER, or an SpCas9-MQKFRAER nickase comprises any one, two, three, four, five, six, seven, eight, nine, or ten of the following amino acid substitutions in a corresponding residue: S217A, K218A, S219A, R220A, R221A, D699K, D700K, R765A, Q768A, K772A, K775A, K913A, K918A, R919A, K877A, K878A, K880A, R884A, K890A, R895A, and K896A. In some embodiments a Hi-Fi Cas9 or an SpCas9-MQKFRAER nickase comprises any one of the following amino acid substitutions: S217A, K218A, S219A, R220A, R221A, D699K, D700K, R765A, Q768A, K772A, K775A, K913A, K918A, R919A, K877A, K878A, K880A, R884A, K890A, R895A, and K896A.

[0232] In some embodiments, any of the Cas9 proteins provided herein, including an SpCas9, a Hi-Fi Cas9, an SpCas9-MQKFRAER, or anSpCas9-MQKFRAER nickase comprises any two, three, four, five, or six of the following amino acid substitutions in a corresponding residue: S217A, K218A, S219A, R220A, R221A, D699K, D700K, R765A, Q768A, K772A, K775A, K913A, K918A, R919A, K877A, K878A, K880A, R884A, K890A, R895A, and K896A. In some embodiments, the two amino acid substitutions are S217A and K218A; R220A and R221A; D699K and D700K; R765A and Q768A; K772A and K775A; or R895A and K896A. In some embodiments, a Hi-Fi Cas9 or an SpCas9-MQKFRAER nickase comprises the two amino acid substitutions S217A and K218A; R220A and R221A; D699K and D700K; R765A and Q768A; K772A and K775A; or R895A and K896A. In some embodiments, the three amino acid substitutions are S219A, R220A and R221A; or K913A, K918A and R919A. In some embodiments, a Hi-Fi Cas9 or an SpCas9-MQKFRAER nickase comprises the three amino acid substitutions S219A, R220A and R221A; or K913A, K918A and R919A. In some embodiments, the four amino acid substitutions are R765A, Q768A, K772A and K775A. In some embodiments, a Hi-Fi Cas9 or an SpCas9-MQKFRAER nickase comprises the four amino acid substitutions R765A, Q768A, K772A and K775A. In some embodiments, the five amino acid substitutions are S217A, K218A, S219A, R220A and R221A; or K877A, K878A, K880A, R884A and K890A. In some embodiments, a Hi-Fi Cas9 or an SpCas9-MQKFRAER nickase comprises the five amino acid substitutions S217A, K218A, S219A, R220A and R221A; or K877A, K878A, K880A, R884A and K890A. In some embodiments, the seven amino acid substitutions are K877A, K878A, K880A, R884A, K890A, R895A and K896A. In some embodiments, a Hi-Fi Cas9 or an SpCas9-MQKFRAER nickase comprises the seven amino acid substitutions K877A, K878A, K880A, R884A, K890A, R895A and K896A.

[0233] In some embodiments, the disclosure provides novel Cas9 protein variants. In some embodiments, the disclosure provides novel SpCas9 variants. It should be appreciated that any of the Cas9 amino acid mutations disclosed herein may be made in any of the Cas9 protein provided herein. In some embodiments, any of the Cas9 proteins provided herein, including an SpCas9, a Hi-Fi Cas9, an SpCas9-MQKFRAER, or anSpCas9-MQKFRAER nickase comprises any one, two, three, four, five, six, seven, eight, nine, or ten of the following amino acid substitutions in a corresponding residue: W18R, R40W, I48V, T58A, K65R, K76R, 185T, V93A, D94G, S96G, F119I, H129L, T134A, Y136H, L138Q, A159V, K163E, D173G, 1170T, D173G, Q187R, S204G, S2041, D207G, 1211N, P230S, K233M, K234E, N240S, K263I, T270I, L275Q, L291P, L301Q, L302Q, V322A, and H328L. In some embodiments a SpCas9-MQKFRAER nickase comprises any one of the following amino acid substitutions: W18R, R40W, I48V, T58A, K65R, K76R, I85T, V93A, D94G, S96G, F119I, H129L, T134A, Y136H, L138Q, A159V, K163E, D173G, 1170T, D173G, Q187R, S204G, S2041, D207G, 1211N, P230S, K233M, K234E, N240S, K263I, T270I, L275Q, L291P, L301Q, L302Q, V322A, and H328L.

[0234] In some embodiments, any of the Cas9 proteins provided herein, including an SpCas9, a Hi-Fi Cas9, an SpCas9-MQKFRAER, or anSpCas9-MQKFRAER nickase comprises any two, three, four, five, or six of the following amino acid substitutions in a corresponding residue: W18R, R40W, I48V, T58A, K65R, K76R, I85T, V93A, D94G, S96G, F119I, H129L, T134A, Y136H, L138Q, A159V, K163E, D173G, 1170T, D173G, Q187R, S204G, S2041, D207G, 1211N, P230S, K233M, K234E, N240S, K263I, T270I, L275Q, L291P, L301Q, L302Q, V322A, and H328L. In some embodiments, the two amino acid substitutions are V93A, and F119I; D94G, and A159V; S96G, and Y136H; T134A, and K163E; I170T, and I211N; D173G, and D207G; D173G, and P230S; D173G, and K234E; S204G, and N240S; K263I, and T270I; L301Q, and V322A; or L302Q, and H328L. In some embodiments, a SpCas9-MQKFRAER nickase comprises the two amino acid substitutions V93A, and F119I; D94G, and A159V; S96G, and Y136H; T134A, and K163E; I170T, and I211N; D173G, and D207G; D173G, and P230S; D173G, and K234E; S204G, and N240S; K263I, and T270I; L301Q, and V322A; or L302Q, and H328L.

[0235] In some embodiments, the disclosure provides novel Cas9 protein variants. In some embodiments, the disclosure provides novel SpCas9 variants. It should be appreciated that any of the Cas9 amino acid mutations disclosed herein may be made in any of the Cas9 protein provided herein. In some embodiments, any of the Cas9 proteins provided herein, including an SpCas9, a Hi-Fi Cas9, an SpCas9-MQKFRAER, or anSpCas9-MQKFRAER nickase comprises any one, two, three, four, five, six, seven, eight, nine, or ten of the following amino acid substitutions in a corresponding residue: Q190L, N202S, K209M, K263I, T270I, V322A, G1104D, S1106N, D1117N, A1121T, D1127N, K1129E, T11381, V1139M, A1147T, V1160M, L1164Q, A1184T, E1205V, A1217T, H1241L, K1246E, D1251G, H1264L, Y1265C, L1266Q, R1279G, A1283D, K1325G, 11331T, S1338G, L1343Q, H1349Y, R1359W, I1360S, G1367C, G1367Y, and G1378D. In some embodiments a SpCas9-MQKFRAER nickase comprises any one of the following amino acid substitutions: Q190L, N202S, K209M, K263I, T270I, V322A, G1104D, S1106N, D1117N, A1121T, D1127N, K1129E, T11381, V1139M, A1147T, V1160M, L1164Q, A1184T, E1205V, A1217T, H1241L, K1246E, D1251G, H1264L, Y1265C, L1266Q, R1279G, A1283D, K1325G, 11331T, 51338G, L1343Q, H1349Y, R1359W, I1360S, G1367C, G1367Y, and G1378D.

[0236] In some embodiments, any of the Cas9 proteins provided herein, including an SpCas9, a Hi-Fi Cas9, an SpCas9-MQKFRAER, or anSpCas9-MQKFRAER nickase comprises any two, three, four, five, or six of the following amino acid substitutions in a corresponding residue: Q190L, N202S, K209M, K263I, T270I, V322A, G1104D, S1106N, D1117N, A1121T, D1127N, K1129E, T11381, V1139M, A1147T, V1160M, L1164Q, A1184T, E1205V, A1217T, H1241L, K1246E, D1251G, H1264L, Y1265C, L1266Q, R1279G, A1283D, K1325G, 11331T, 51338G, L1343Q, H1349Y, R1359W, I1360S, G1367C, G1367Y, and G1378D. In some embodiments, the two amino acid substitutions are H1241L, and H1264L; or K1246E, and L1266Q; D1251G, and Y1265C; or Y1265C, and A1283D. In some embodiments, a SpCas9-MQKFRAER nickase comprises the two amino acid substitutions H1241L, and H1264L; or K1246E, and L1266Q; D1251G, and Y1265C; or Y1265C, and A1283D. In some embodiments, the three amino acid substitutions are Q190L, N202S, and K209M; K263I, T270I, and V322A; or D1251G, Y1265C, and A1283D. In some embodiments, a SpCas9-MQKFRAER nickase comprises the three amino acid substitutions Q190L, N202S, and K209M; K263I, T270I, and V322A; or D1251G, Y1265C, and A1283D.

[0237] Some aspects of the disclosure provide Cas9 variants, e.g., for use in base editors or base editor systems. In some embodiments the Cas9 variants are used in adenosine base editors or adenosine base editor systems. In some embodiments, the Cas9 variant is a SpCas9-MQKFRAER nickase variant. In some embodiments, the Cas9 Variant comprises an amino acid sequence that is at least 70%, 75%, 80%, 85%, 90%, 95%, 96%, 97%, 98%, 99%, or 100% identical to the amino acid sequence of the SpCas9-MQKFRAER nickase or the SpCas9-MQKFRAER nickase without the N-terminal methionine. In some embodiments, the Cas9 variant comprises an R1337K mutation, which is the Cas9 variant used in ABE Variant A. In some embodiments, the Cas9 variant comprises an R1337K, and a Q1136Y mutation, which is the Cas9 variant used in ABE Variant B. In some embodiments, the Cas9 variant comprises an M1135L, Q1136Y, and R1337K mutation, which is the Cas9 variant used in ABE Variant C. In some embodiments, the Cas9 variant comprises an Q1136Y, and R1337K mutation, which is the Cas9 variant used in ABE Variant D. In some embodiments, the Cas9 variant comprises an M1135L, R1337K, and Q1136Y mutation, which is the Cas9 variant used in ABE Variant E. In some embodiments, the Cas9 variant comprises an M1135L, A1283D, Q1136Y, and R1337K mutation, which is the Cas9 variant used in ABE Variant F. In some embodiments, the Cas9 variant comprises an M1135L, A1283D, E1250K, and R1337K mutation, which is the Cas9 variant used in ABE Variant G. In some embodiments, the Cas9 variant comprises an A1283D, E1250K, and Q1136Y mutation, which is the Cas9 variant used in ABE Variant H. In some embodiments, the Cas9 variant comprises an M1135L, A1283D, Q1136Y, and R1337K mutation, which is the Cas9 variant used in ABE Variant I. In some embodiments, the Cas9 variant comprises an M1135L, A1283D, Q1136Y, R1337K, R765A, and Q768A mutation, which is the Cas9 variant used in ABE Variant J. In some embodiments, the Cas9 variant comprises an A1283D, E1250K, and Q1136Y mutation, which is the Cas9 variant used in ABE Variant K. In some embodiments, the Cas9 variant comprises the amino acid sequence

(SEQ ID NO: 463)
DKKYSIGLAIGTNSVGWAVITDEYKVPSKKFKVLGNTDRHSIKKNLIGALLFDSGETAEATR
LKRTARRRYTRRKNRICYLQEIFSNEMAKVDDSFFHRLEESFLVEEDKKHERHPIFGNIVDE
VAYHEKYPTIYHLRKKLVDSTDKADLRLIYLALAHMIKFRGHFLIEGDLNPDNSDVDKLFIQ
LVQTYNQLFEENPINASGVDAKAILSARLSKSRRLENLIAQLPGEKKNGLFGNLIALSLGLT
PNFKSNFDLAEDAKLQLSKDTYDDDLDNLLAQIGDQYADLFLAAKNLSDAILLSDILRVNTE
ITKAPLSASMVKRYDEHHQDLTLLKALVRQQLPEKYKEIFFDQSKNGYAGYIDGGASQEEFY
KFIKPILEKMDGTEELLVKLNREDLLRKORTFDNGIIPHQIHLGELHAILRRQGDFYPFLKD
NREKIEKILTFRIPYYVGPLARGNSRFAWMTRKSEETITPWNFEEVVDKGASAQSFIERMTN
FDKNLPNEKVLPKHSLLYEYFTVYNELTKVKYVTEGMRKPAFLSGEQKKAIVDLLFKTNRKV
TVKQLKEDYFKKIECFDSVEISGVEDRFNASLGTYHDLLKIIKDKDFLDNEENEDILEDIVL
TLTLFEDREMIEERLKTYAHLFDDKVMKQLKRLRYTGWGRLSRKLINGIRDKQSGKTILDFL
KSDGFANRNFMQLIHDDSLTFKEDIQKAQVSGQGDSLHEHIANLAGSPAIKKGILQTVKVVD
ELVKVMGGHKPENIVIEMARENQTTQKGQKNSRERMKRIEEGIKELGSQILKEHPVENTQLQ
NEKLYLYYLQNGRDMYVDQELDINRLSDYDVDHIVPQSFLKDDSIDNKVLTRSDKNRGKSDN
VPSEEVVKKMKNYWRQLLNAKLITQRKFDNLTKAERGGLSELDKAGFIKRQLVETRQITKHV
AQILDSRMNTKYDENDKLIREVKVITLKSKLVSDFRKDFQFYKVREINNYHHAHDAYLNAVV
GTALIKKYPKLESEFVYGDYKVYDVRKMIAKSEQEIGKATAKYFFYSNIMNFFKTEITLANG
EIRKRPLIETNGETGEIVWDKGRDFATVRKVLSMPQVNIVKKTEVQTGGFSKESILPKGNSD
KLIARKKDWDPKKYGGFLQPTVAYSVLVVAKVEKGKSKKLKSVKELLGITIMERSSFEKNPI
DFLEAKGYKEVKKDLIIKLPKYSLFELENGRKRMLASAKFLQKGNELALPSKYVNFLYLASH
YEKLKGSPKDNEQKQLFVEQHKHYLDEIIEQISEFSKRVILDDANLDKVLSAYNKHRDKPIR
EQAENIIHLFTLTNLGAPRAFKYFDTTIARKEYKSTKEVLDATLIHQSITGLYETRIDLSQL
GGD (Variant G).

[0238] Polynucleotide programmable nucleotide binding domains bind polynucleotides (e.g., RNA, DNA). A polynucleotide programmable nucleotide binding domain of a base editor can itself comprise one or more domains (e.g., one or more nuclease domains). In some embodiments, the nuclease domain of a polynucleotide programmable nucleotide binding domain comprises an endonuclease or an exonuclease.

[0239] Disclosed herein are base editors comprising a polynucleotide programmable nucleotide binding domain comprising all or a portion (e.g., a functional portion) of a CRISPR protein (i.e., a base editor comprising as a domain all or a portion (e.g., a functional portion) of a CRISPR protein (e.g., a Cas protein), also referred to as a “CRISPR protein-derived domain” of the base editor). A CRISPR protein-derived domain incorporated into a base editor can be modified compared to a wild-type or natural version of the CRISPR protein. A CRISPR protein-derived domain can comprise one or more mutations, insertions, deletions, rearrangements and/or recombinations relative to a wild-type or natural version of the CRISPR protein.

[0240] Cas proteins that can be used herein include class 1 and class 2. Non-limiting examples of Cas proteins include Cas1, Cas1B, Cas2, Cas3, Cas4, Cas5, Cas5d, Cas5t, Cas5h, Cas5a, Cas6, Cas7, Cas8, Cas9 (also known as Csn1 or Csx12), Cas10, Csy1, Csy2, Csy3, Csy4, Cse1, Cse2, Cse3, Cse4, Cse5e, Csc1, Csc2, Csa5, Csn1, Csn2, Csm1, Csm2, Csm3, Csm4, Csm5, Csm6, Cmr1, Cmr3, Cmr4, Cmr5, Cmr6, Csb1, Csb2, Csb3, Csx17, Csx14, Csx10, Csx16, CsaX, Csx3, Csx1, Csx1S, Csf1, Csf2, CsO, Csf4, Csd1, Csd2, Cst1, Cst2, Csh1, Csh2, Csa1, Csa2, Csa3, Csa4, Csa5, Cas12a/Cpf1, Cas12b/C2c1 (e.g., SEQ ID NO: 232), Cas12c/C2c3, Cas12d/CasY, Cas12e/CasX, Cas12g, Cas12h, Cas12i, and Cas12j/CasΦ, CARF, DinG, Turbo Cas9 (i.e., an SpCas9 with the amino acid alterations Q844R, V842L, F846Y, L847M, and I852F), homologues thereof, or modified versions thereof. A CRISPR enzyme can direct cleavage of one or both strands at a target sequence, such as within a target sequence and/or within a complement of a target sequence. For example, a CRISPR enzyme can direct cleavage of one or both strands within about 1, 2, 3, 4, 5, 6, 7, 8, 9, 10, 15, 20, 25, 50, 100, 200, 500, or more base pairs from the first or last nucleotide of a target sequence.

[0241] A vector that encodes a CRISPR enzyme that is mutated to with respect to a corresponding wild-type enzyme such that the mutated CRISPR enzyme lacks the ability to cleave one or both strands of a target polynucleotide containing a target sequence can be used. A Cas protein (e.g., Cas9, Cas12) or a Cas domain (e.g., Cas9, Cas12) can refer to a polypeptide or domain with at least or at least about 50%, 60%, 70%, 80%, 90%, 91%, 92%, 93%, 94%, 95%, 96%, 97%, 98%, 99%, or 100% sequence identity and/or sequence homology to a wild-type exemplary Cas polypeptide or Cas domain. Cas (e.g., Cas9, Cas12) can refer to the wild-type or a modified form of the Cas protein that can comprise an amino acid change such as a deletion, insertion, substitution, variant, mutation, fusion, chimera, or any combination thereof.

[0242] In some embodiments, a CRISPR protein-derived domain of a base editor can include all or a portion (e.g., a functional portion) of Cas9 from Corynebacterium ulcerans (NCBI Refs: NC_015683.1, NC_017317.1); Corynebacterium diphtheria (NCBI Refs: NC_016782.1, NC_016786.1); Spiroplasma syrphidicola (NCBI Ref: NC_021284.1); Prevotella intermedia (NCBI Ref: NC_017861.1); Spiroplasma taiwanense (NCBI Ref: NC_021846.1); Streptococcus iniae (NCBI Ref: NC_021314.1); Belliella baltica (NCBI Ref: NC_018010.1); Psychroflexus torquis (NCBI Ref: NC_018721.1); Streptococcus thermophilus (NCBI Ref: YP_820832.1); Listeria innocua (NCBI Ref: NP_472073.1); Campylobacter jejuni (NCBI Ref: YP_002344900.1); Neisseria meningitidis (NCBI Ref: YP_002342100.1), Streptococcus pyogenes, or Staphylococcus aureus.

[0243] Some aspects of the disclosure provide high fidelity Cas9 domains. High fidelity Cas9 domains are known in the art and described, for example, in Kleinstiver, B. P., et al. “High-fidelity CRISPR-Cas9 nucleases with no detectable genome-wide off-target effects.” Nature 529, 490-495 (2016); and Slaymaker, I. M., et al. “Rationally engineered Cas9 nucleases with improved specificity.” Science 351, 84-88 (2015); the entire contents of each of which are incorporated herein by reference. An Exemplary high fidelity Cas9 domain is provided in the Sequence Listing as SEQ ID NO: 233.

[0244] In some embodiments, any of the Cas9 fusion proteins or complexes provided herein comprise one or more of a D10A, N497X, a R661X, a Q695X, and/or a Q926X mutation, or a corresponding mutation in any of the amino acid sequences provided herein, wherein X is any amino acid.

[0245] Typically, Cas9 proteins, such as Cas9 from S. pyogenes (spCas9), require a “protospacer adjacent motif (PAM)” or PAM-like motif, which is a 2-6 base pair DNA sequence immediately following the DNA sequence targeted by the Cas9 nuclease in the CRISPR bacterial adaptive immune system. The presence of an NGG PAM sequence is required to bind a particular nucleic acid region, where the “N” in “NGG” is adenosine (A), thymidine (T), or cytosine (C), and the G is guanosine. In some embodiments, any of the fusion proteins or complexes provided herein may contain a Cas9 domain that is capable of binding a nucleotide sequence that does not contain a canonical (e.g., NGG) PAM sequence. Cas9 domains that bind to non-canonical PAM sequences have been described in the art and would be apparent to the skilled artisan. For example, Cas9 domains that bind non-canonical PAM sequences have been described in Kleinstiver, B. P., et al., “Engineered CRISPR-Cas9 nucleases with altered PAM specificities” Nature 523, 481-485 (2015); and Kleinstiver, B. P., et al., “Broadening the targeting range of Staphylococcus aureus CRISPR-Cas9 by modifying PAM recognition” Nature Biotechnology 33, 1293-1298 (2015); the entire contents of each are hereby incorporated by reference.

[0246] In some embodiments, the napDNAbp is a circular permutant (e.g., SEQ ID NO: 238).

[0247] In some embodiments, the polynucleotide programmable nucleotide binding domain comprises a nickase domain. Herein the term “nickase” refers to a polynucleotide programmable nucleotide binding domain comprising a nuclease domain that is capable of cleaving only one strand of the two strands in a duplexed nucleic acid molecule (e.g., DNA). For example, where a polynucleotide programmable nucleotide binding domain comprises a nickase domain derived from Cas9, the Cas9-derived nickase domain can include a D10A mutation and a histidine at position 840. In another example, a Cas9-derived nickase domain comprises an H840A mutation, while the amino acid residue at position 10 remains a D.

[0248] In some embodiments, a Cas9 nuclease has an inactive (e.g., an inactivated) DNA cleavage domain, that is, the Cas9 is a nickase, referred to as an “nCas9” protein (for “nickase” Cas9; SEQ ID NO: 201). The Cas9 nickase may be a Cas9 protein that is capable of cleaving only one strand of a duplexed nucleic acid molecule (e.g., a duplexed DNA molecule). In some embodiments the Cas9 nickase comprises an amino acid sequence that is at least 60%, at least 65%, at least 70%, at least 75%, at least 80%, at least 85%, at least 90%, at least 95%, at least 96%, at least 97%, at least 98%, at least 99%, or at least 99.5% identical to any one of the Cas9 nickases provided herein. Additional suitable Cas9 nickases will be apparent to those of skill in the art based on this disclosure and knowledge in the field and are within the scope of this disclosure.

[0249] Also provided herein are base editors comprising a polynucleotide programmable nucleotide binding domain which is catalytically dead (i.e., incapable of cleaving a target polynucleotide sequence). For example, in the case of a base editor comprising a Cas9 domain, the Cas9 can comprise both a D10A mutation and an H840A mutation. In further embodiments, a catalytically dead polynucleotide programmable nucleotide binding domain comprises a point mutation (e.g., D10A or H840A) as well as a deletion of all or a portion (e.g., a functional portion) of a nuclease domain. dCas9 domains are known in the art and described, for example, in Qi et al., “Repurposing CRISPR as an RNA-guided platform for sequence-specific control of gene expression.” Cell. 2013; 152(5):1173-83, the entire contents of which are incorporated herein by reference.

[0250] The term “protospacer adjacent motif (PAM)” or PAM-like motif refers to a 2-6 base pair DNA sequence immediately following the DNA sequence targeted by a nucleic acid programmable DNA binding protein. In some embodiments, the PAM can be a 5′ PAM (i.e., located upstream of the 5′ end of the protospacer). In other embodiments, the PAM can be a 3′ PAM (i.e., located downstream of the 5′ end of the protospacer). The PAM sequence can be any PAM sequence known in the art. Suitable PAM sequences include, but are not limited to, NGG, NGA, NGC, NGN, NGT, NGTT, NGCG, NGAG, NGAN, NGNG, NGCN, NGCG, NGTN, NNGRRT, NNNRRT, NNGRR(N), TTTV, TYCV, TYCV, TATV, NNNNGATT, NNAGAAW, or NAAAAC. Y is a pyrimidine; N is any nucleotide base; W is A or T.

[0251] A base editor provided herein can comprise a CRISPR protein-derived domain that is capable of binding a nucleotide sequence that contains a canonical or non-canonical protospacer adjacent motif (PAM) sequence.

[0252] In some embodiments, the PAM is an “NRN” PAM where the “N” in “NRN” is adenine (A), thymine (T), guanine (G), or cytosine (C), and the R is adenine (A) or guanine (G); or the PAM is an “NYN” PAM, wherein the “N” in NYN is adenine (A), thymine (T), guanine (G), or cytosine (C), and the Y is cytidine (C) or thymine (T), for example, as described in R. T. Walton et al., 2020, Science, 10.1126/science.aba8853 (2020), the entire contents of which are incorporated herein by reference.

[0253] Several PAM variants are described in Table 3 below.

TABLE 3
Cas9 proteins and corresponding PAM sequences.

| | |
|---|---|
| Variant | PAM |
| spCas9 | NGG |
| spCas9-VRQR | NGA |
| spCas9-VRER | NGCG |
| xCas9 (sp) | NGN |
| saCas9 | NNGRRT |
| saCas9-KKH | NNNRRT |
| spCas9-LRKIQK | NGTN |
| spCas9-LRVSQK | NGTN |
| spCas9-LRVSQL | NGTN |
| spCas9-MQKFRAER | NGC |
| Cpf1 | 5′ (TTTV) |
| SpyMac | 5′-NAA-3′ |

N is A, C, T, or G; and Vis A, C, or G.

[0254] In some embodiments, the PAM is NGC. In some embodiments, the NGC PAM is recognized by a Cas9 variant. In some embodiments, the NGC PAM Cas9 variant includes one or more amino acid substitutions selected from D1135M, S1136Q, G1218K, E1219F, A1322R, D1332A, R1335E, and T1337R (collectively termed “MQKFRAER”) of spCas9 (SEQ ID No: 197), or a corresponding mutation in another Cas9. In some embodiments, the Cas9 variant contains one or more amino acid substitutions selected from D1135V, G1218R, R1335Q, and T1337R (collectively termed VRQR) of spCas9 (SEQ ID No: 197), or a corresponding mutation in another Cas9. In some embodiments, the Cas9 variant contains one or more amino acid substitutions selected from D1135V, G1218R, R1335E, and T1337R (collectively termed VRER) of spCas9 (SEQ ID No: 197), or a corresponding mutation in another Cas9. In some embodiments, the Cas9 variant contains one or more amino acid substitutions selected from E782K, N968K, and R1015H (collectively termed KHH) of saCas9 (SEQ ID NO: 218).

[0255] In some embodiments, a CRISPR protein-derived domain of a base editor comprises all or a portion (e.g., a functional portion) of a Cas9 protein with a canonical PAM sequence (NGG). In other embodiments, a Cas9-derived domain of a base editor can employ a non-canonical PAM sequence. Such sequences have been described in the art and would be apparent to the skilled artisan. For example, Cas9 domains that bind non-canonical PAM sequences have been described in Kleinstiver, B. P., et al., “Engineered CRISPR-Cas9 nucleases with altered PAM specificities” Nature 523, 481-485 (2015); and Kleinstiver, B. P., et al., “Broadening the targeting range of Staphylococcus aureus CRISPR-Cas9 by modifying PAM recognition” Nature Biotechnology 33, 1293-1298 (2015); R. T. Walton et al. “Unconstrained genome targeting with near-PAMless engineered CRISPR-Cas9 variants” Science 10.1126/science.aba8853 (2020); Hu et al. “Evolved Cas9 variants with broad PAM compatibility and high DNA specificity,” Nature, 2018 Apr. 5, 556(7699), 57-63; Miller et al., “Continuous evolution of SpCas9 variants compatible with non-G PAMs” Nat. Biotechnol., 2020 April; 38(4):471-481; the entire contents of each are hereby incorporated by reference.

Fusion Proteins or Complexes Comprising a NapDNAbp and a Cytidine Deaminase and/or Adenosine Deaminase

[0256] Some aspects of the disclosure provide fusion proteins or complexes comprising a Cas9 domain or other nucleic acid programmable DNA binding protein (e.g., Cas12) and one or more cytidine deaminase, adenosine deaminase, or cytidine adenosine deaminase domains. It should be appreciated that the Cas9 domain may be any of the Cas9 domains or Cas9 proteins (e.g., dCas9 or nCas9) provided herein. In some embodiments, any of the Cas9 domains or Cas9 proteins (e.g., dCas9 or nCas9) provided herein may be fused with any of the cytidine deaminases and/or adenosine deaminases provided herein. The domains of the base editors disclosed herein can be arranged in any order.

[0257] In some embodiments, the fusion proteins or complexes comprising a cytidine deaminase or adenosine deaminase and a napDNAbp (e.g., Cas9 or Cas12 domain) do not include a linker sequence. In some embodiments, a linker is present between the cytidine or adenosine deaminase and the napDNAbp. In some embodiments, cytidine or adenosine deaminase and the napDNAbp are fused via any of the linkers provided herein. For example, in some embodiments the cytidine or adenosine deaminase and the napDNAbp are fused via any of the linkers provided herein.

[0258] It should be appreciated that the fusion proteins or complexes of the present disclosure may comprise one or more additional features. For example, in some embodiments, the fusion protein or complex may comprise inhibitors, cytoplasmic localization sequences, export sequences, such as nuclear export sequences, or other localization sequences, as well as sequence tags that are useful for solubilization, purification, or detection of the fusion proteins or complexes. Suitable protein tags provided herein include, but are not limited to, biotin carboxylase carrier protein (BCCP) tags, myc-tags, calmodulin-tags, FLAG-tags, hemagglutinin (HA)-tags, polyhistidine tags, also referred to as histidine tags or His-tags, maltose binding protein (MBP)-tags, nus-tags, glutathione-S-transferase (GST)-tags, green fluorescent protein (GFP)-tags, thioredoxin-tags, S-tags, Softags (e.g., Softag 1, Softag 3), strep-tags, biotin ligase tags, FlAsH tags, V5 tags, and SBP-tags. Additional suitable sequences will be apparent to those of skill in the art. In some embodiments, the fusion protein or complex comprises one or more His tags.

[0259] Exemplary, yet nonlimiting, fusion proteins are described in International PCT Application Nos. PCT/US2017/045381, PCT/US2019/044935, and PCT/US2020/016288, each of which is incorporated herein by reference for its entirety.

Fusion Proteins or Complexes with Internal Insertions

[0260] Provided herein are fusion proteins or complexes comprising a heterologous polypeptide fused to a nucleic acid programmable nucleic acid binding protein, for example, a napDNAbp. The heterologous polypeptide can be fused to the napDNAbp at a C-terminal end of the napDNAbp, an N-terminal end of the napDNAbp, or inserted at an internal location of the napDNAbp. In some embodiments, the heterologous polypeptide is a deaminase (e.g., cytidine or adenosine deaminase) or a functional fragment thereof. For example, a fusion protein can comprise a deaminase flanked by an N-terminal fragment and a C-terminal fragment of a Cas9 or Cas12 (e.g., Cas12b/C2c1), polypeptide.

[0261] The deaminase can be a circular permutant deaminase. In some embodiments, the deaminase is a circular permutant TadA, circularly permutated at amino acid residue 116, 136, or 65 as numbered in a TadA reference sequence.

[0262] The fusion protein or complexes can comprise more than one deaminase. The fusion protein or complex can comprise, for example, 1, 2, 3, 4, 5 or more deaminases. The deaminases in a fusion protein or complex can be adenosine deaminases, cytidine deaminases, or a combination thereof.

[0263] In some embodiments, the napDNAbp in the fusion protein or complex contains a Cas9 polypeptide or a fragment thereof. The Cas9 polypeptide can be a variant Cas9 polypeptide. The Cas9 polypeptide can be a circularly permuted Cas9 protein.

[0264] The heterologous polypeptide (e.g., deaminase) can be inserted in the napDNAbp (e.g., Cas9 or Cas12 (e.g., Cas12b/C2c1)) at a suitable location, for example, such that the napDNAbp retains its ability to bind the target polynucleotide and a guide nucleic acid. A deaminase (e.g., adenosine deaminase, cytidine deaminase, or adenosine deaminase and cytidine deaminase (dual deaminase)) can be inserted into a napDNAbp without compromising function of the deaminase (e.g., base editing activity) or the napDNAbp (e.g., ability to bind to target nucleic acid and guide nucleic acid).

[0265] In some embodiments, the deaminase (e.g., adenosine deaminase, cytidine deaminase, or adenosine deaminase and cytidine deaminase) is inserted in regions of the Cas9 polypeptide comprising higher than average B-factors (e.g., higher B factors compared to the total protein or the protein domain comprising the disordered region). Cas9 polypeptide positions comprising a higher than average B-factor can include, for example, residues 768, 792, 1052, 1015, 1022, 1026, 1029, 1067, 1040, 1054, 1068, 1246, 1247, and 1248 as numbered in SEQ ID NO: 197. Cas9 polypeptide regions comprising a higher than average B-factor can include, for example, residues 792-872, 792-906, and 2-791 as numbered in SEQ ID NO: 197.

[0266] In some embodiments, a heterologous polypeptide (e.g., deaminase) is inserted in a flexible loop of a Cas9 polypeptide. The flexible loop portions can be selected from the group consisting of 530-537, 569-570, 686-691, 943-947, 1002-1025, 1052-1077, 1232-1247, or 1298-1300 as numbered in SEQ ID NO: 197, or a corresponding amino acid residue in another Cas9 polypeptide. The flexible loop portions can be selected from the group consisting of: 1-529, 538-568, 580-685, 692-942, 948-1001, 1026-1051, 1078-1231, or 1248-1297 as numbered in SEQ ID NO: 197, or a corresponding amino acid residue in another Cas9 polypeptide.

[0267] A heterologous polypeptide (e.g., adenine deaminase) can be inserted into a Cas9 polypeptide region corresponding to amino acid residues: 1017-1069, 1242-1247, 1052-1056, 1060-1077, 1002-1003, 943-947, 530-537, 568-579, 686-691, 1242-1247, 1298-1300, 1066-1077, 1052-1056, or 1060-1077 as numbered in SEQ ID NO: 197, or a corresponding amino acid residue in another Cas9 polypeptide.

[0268] A heterologous polypeptide (e.g., adenine deaminase) can be inserted in place of a deleted region of a Cas9 polypeptide. The deleted region can correspond to an N-terminal or C-terminal portion of the Cas9 polypeptide. Exemplary internal fusions base editors are provided in Table 4A below:

TABLE 4A
Insertion loci in Cas9 proteins

| BE ID | Modification | Other ID |
|---|---|---|
| IBE001 | Cas9 TadA ins 1015 | ISLAY01 |
| IBE002 | Cas9 TadA ins 1022 | ISLAY02 |
| IBE003 | Cas9 TadA ins 1029 | ISLAY03 |
| IBE004 | Cas9 TadA ins 1040 | ISLAY04 |
| IBE005 | Cas9 TadA ins 1068 | ISLAY05 |
| IBE006 | Cas9 TadA ins 1247 | ISLAY06 |
| IBE007 | Cas9 TadA ins 1054 | ISLAY07 |
| IBE008 | Cas9 TadA ins 1026 | ISLAY08 |
| IBE009 | Cas9 TadA ins 768 | ISLAY09 |
| IBE020 | delta HNH TadA 792 | ISLAY20 |
| IBE021 | N-term fusion single TadA helix truncated 165-end | ISLAY21 |
| IBE029 | TadA-Circular Permutant116 ins1067 | ISLAY29 |
| IBE031 | TadA- Circular Permutant 136 ins1248 | ISLAY31 |
| IBE032 | TadA- Circular Permutant 136ins 1052 | ISLAY32 |
| IBE035 | delta 792-872 TadA ins | ISLAY35 |
| IBE036 | delta 792-906 TadA ins | ISLAY36 |
| IBE043 | TadA-Circular Permutant 65 ins1246 | ISLAY43 |
| IBE044 | TadA ins C-term truncate2 791 | ISLAY44 |

[0269] A heterologous polypeptide (e.g., deaminase) can be inserted within a structural or functional domain of a Cas9 polypeptide. A heterologous polypeptide (e.g., deaminase) can be inserted between two structural or functional domains of a Cas9 polypeptide. A heterologous polypeptide (e.g., deaminase) can be inserted in place of a structural or functional domain of a Cas9 polypeptide, for example, after deleting the domain from the Cas9 polypeptide. The structural or functional domains of a Cas9 polypeptide can include, for example, RuvC I, RuvC II, RuvC III, Rec1, Rec2, PI, or HNH.

[0270] A fusion protein can comprise a linker between the deaminase and the napDNAbp polypeptide. The linker can be a peptide or a non-peptide linker. For example, the linker can be an XTEN, (GGGS)ₙ (SEQ ID NO: 246), SGGSSGGS (SEQ ID NO: 330), (GGGGS)ₙ (SEQ ID NO: 247), (G)ₙ, (EAAAK)ₙ (SEQ ID NO: 248), (GGS)ₙ, SGSETPGTSESATPES (SEQ ID NO: 249). In some embodiments, the fusion protein comprises a linker between the N-terminal Cas9 fragment and the deaminase. In some embodiments, the fusion protein comprises a linker between the C-terminal Cas9 fragment and the deaminase. In some embodiments, the N-terminal and C-terminal fragments of napDNAbp are connected to the deaminase with a linker. In some embodiments, the N-terminal and C-terminal fragments are joined to the deaminase domain without a linker. In some embodiments, the fusion protein comprises a linker between the N-terminal Cas9 fragment and the deaminase but does not comprise a linker between the C-terminal Cas9 fragment and the deaminase. In some embodiments, the fusion protein comprises a linker between the C-terminal Cas9 fragment and the deaminase but does not comprise a linker between the N-terminal Cas9 fragment and the deaminase.

[0271] In some embodiments, the napDNAbp in the fusion protein or complex is a Cas12 polypeptide, e.g., Cas12b/C2c1, or a functional fragment thereof capable of associating with a nucleic acid (e.g., a gRNA) that guides the Cas12 to a specific nucleic acid sequence. The Cas12 polypeptide can be a variant Cas12 polypeptide. In other embodiments, the N- or C-terminal fragments of the Cas12 polypeptide comprise a nucleic acid programmable DNA binding domain or a RuvC domain. In other embodiments, the fusion protein contains a linker between the Cas12 polypeptide and the catalytic domain. In other embodiments, the amino acid sequence of the linker is GGSGGS (SEQ ID NO: 250) or GSSGSETPGTSESATPESSG (SEQ ID NO: 251). In other embodiments, the linker is a rigid linker. In other embodiments of the above aspects, the linker is encoded by GGAGGCTCTGGAGGAAGC (SEQ ID NO: 252) or GGCTCTTCTGGATCTGAAACACCTGGCACAAGCGAGAGCGCCACCCCTGAGAGCTCTGGC (SEQ ID NO: 253).

[0272] In other embodiments, the fusion protein or complex contains a nuclear localization signal (e.g., a bipartite nuclear localization signal). In other embodiments, the amino acid sequence of the nuclear localization signal is MAPKKKRKVGIHGVPAA (SEQ ID NO: 261). In other embodiments of the above aspects, the nuclear localization signal is encoded by the following sequence: ATGGCCCCAAAGAAGAAGCGGAAGGTCGGTATCCACGGAGTCCCAGCAGCC (SEQ ID NO: 262). In other embodiments, the Cas12b polypeptide contains a mutation that silences the catalytic activity of a RuvC domain. In other embodiments, the Cas12b polypeptide contains D574A, D829A and/or D952A mutations.

[0273] In some embodiments, the fusion protein or complex comprises a napDNAbp domain (e.g., Cas12-derived domain) with an internally fused nucleobase editing domain (e.g., all or a portion (e.g., a functional portion) of a deaminase domain, e.g., an adenosine deaminase domain). In some embodiments, the napDNAbp is a Cas12b. In some embodiments, the base editor comprises a BhCas12b domain with an internally fused TadA*8 domain inserted at the loci provided in Table 4B below.

TABLE 4B
Insertion loci in Cas12b proteins

| | Insertion site | Inserted between aa |
|---|---|---|
| BhCas12b | | |
| position 1 | 153 | PS |
| position 2 | 255 | KE |
| position 3 | 306 | DE |
| position 4 | 980 | DG |
| position 5 | 1019 | KL |
| position 6 | 534 | FP |
| position 7 | 604 | KG |
| position 8 | 344 | HF |
| BvCas12b | | |
| position 1 | 147 | PD |
| position 2 | 248 | GG |
| position 3 | 299 | PE |
| position 4 | 991 | GE |
| position 5 | 1031 | KM |
| AaCas12b | | |
| position 1 | 157 | PG |
| position 2 | 258 | VG |
| position 3 | 310 | DP |
| position 4 | 1008 | GE |
| position 5 | 1044 | GK |

[0274] In some embodiments, the base editing system described herein is an ABE with TadA inserted into a Cas9. Polypeptide sequences of relevant ABEs with TadA inserted into a Cas9 are provided in the attached Sequence Listing as SEQ ID NOs: 263-308.

[0275] Exemplary, yet nonlimiting, fusion proteins are described in International PCT Application Nos. PCT/US2020/016285 and U.S. Provisional Application Nos. 62/852,228 and 62/852,224, the contents of which are incorporated by reference herein in their entireties.

### Adenosine Deaminases and A to G Editing

[0276] Some aspects of the disclosure provide adenosine deaminases, and novel variants thereof, which may be useful for base editor proteins and base editor systems.

[0277] In some embodiments, the adenosine deaminase comprises at least one alteration in the following sequence: MSEVEFSHEYWMRHALTLAKRARDEREVPVGAVLVLNNRVIGEGWNRAIGLHDPTAHAE IMA LRQGGLVMQNYRLIDATLYVTFEPCVMCAGAMIHSRIGRVVFGVRNAKTGAAGSLMDVLHYP GMNHRVEITEGILADECAALLCYFFRMPRQVFNAQKKAQSSTD (also termed TadA*7.10) (SEQ ID NO: 1). In the interest of clarity, residues L36, 176, V82, Y147, Q154, and N157 are indicated by bold and underlined text. In some embodiments any of the TadA*7.10 polypeptides, or variants thereof, provided herein do not comprise a methionine (M) residue at the beginning of the sequence. For example, TadA*7.10 without the methionine at the beginning of the sequence corresponds to the following amino acid sequence:

(SEQ ID NO: 464)
SEVEFSHEYWMRHALTLAKRARDEREVPVGAVLVLNNRVIGEGWNRAIG
LHDPTAHAEIMALRQGGLVMQNYRLIDATLYVTFEPCVMCAGAMIHSRI
GRVVFGVRNAKTGAAGSLMDVLHYPGMNHRVEITEGILADECAALLCYF
FRMPRQVFNAQKKAQSSTD

It should be appreciated, however, that the amino acid numbering scheme of the TadA*7.10 without the methionine may correspond to the same amino acid numbering scheme of the TadA*7.10 having the initiating methionine present.

[0278] In some embodiments, TadA*7.10 comprises at least one amino acid alteration. In some embodiments, TadA*7.10 comprises an alteration in any one of amino acid residues L36, 176, V82, Y147, Q154, and N157 of TadA*7.10. In some embodiments, TadA*7.10 comprises any one of the amino acid alterations L36H, I76Y, V82T, Y147T, Q154S, and N157K of TadA*7.10.

In some embodiments, TadA*7.10 comprises the amino acid alterations L36H, I76Y, V82T, Y147T, Q154S, and N157K of TadA*7.10. For example, the TadA may have a sequence of SEVEFSHEYWMRHALTLAKRARDEREVPVGAVLVHNNRVIGEGWNRAIGLHDPTAHAEIMAL RQGGLVMQNYRLYDATLYTTFEPCVMCAGAMIHSRIGRVVFGVRNAKTGAAGSLMDVLHYPG MNHRVEITEGILADECAALLCTFFRMPRSVFKAQKKAQSSTD (SEQ ID NO: 426, TadA*7.10 L36H, I76Y, V82T, Y147T, Q154S, and N157K) In some embodiments, the disclosure provides TadA variants comprising a V82T, Y147T, and/or a Q154S mutation. In some embodiments, the disclosure provides TadA*8.8 further comprising a V82T mutation. In some embodiments, the disclosure provides TadA*8.8 further comprising a V82T, a Y147T, and a Q154S mutation. In some embodiments, the disclosure provides TadA*8.17 further comprising a V82T mutation. In some embodiments, the disclosure provides TadA*8.17 further comprising a V82T, a Y147T, and a Q154S mutation. In some embodiments, the disclosure provides TadA*8.20 further comprising a V82T mutation. In some embodiments, the disclosure provides TadA*8.20 further comprising a V82T, a Y147T, and a Q154S mutation. In some embodiments, the disclosure provides any of the TadA proteins, or variants thereof, that have at least 70%, 75%, 80%, 85%, 90%, 95%, 96%, 97%, 98%, or 99% identity to any TadA protein, or variant thereof, provided herein.

[0279] Some aspects of the disclosure provide novel adenosine deaminase variants. In some embodiments, such variants have improved trinucleotide specificity of the target A and adjacent nucleotides (i.e., NAN). In some embodiments, the disclosure provides novel TadA variants. It should be appreciated that any of the TadA amino acid mutations disclosed herein may be made in any of the TadA proteins or variants provided herein. In some embodiments, any of the TadA proteins provided herein, including TadA*7.10, comprises any one, two, three, four, five, six, seven, eight, nine, or ten of the following amino acid substitutions in a corresponding residue: F84Y, A109L, A109V, A109I, A109F, A109S, A109T, A109N, V155S, V155T, V155N, F156Y, F156W, F156R, F156N, and F156Q.

[0280] In some embodiments, any of the TadA proteins provided herein, including TadA*7.10 comprises any two of the following amino acid substitutions in a corresponding residue: F84Y, A109L, A109V, A109I, A109F, A109S, A109T, A109N, V155S, V155T, V155N, F156Y, F156W, F156R, F156N, and F156Q. In some embodiments, the two amino acid substitutions are F84Y and A109L; F84Y and A109S; F84Y and V155S; F84Y and V155N; F84Y and F156R; F84Y and F156N; F84Y and F156Q; A109L and V155S; A109L and V155N; A109L and F156R; A109L and F156N; A109L and F156Q; A109S and V155S; A109S and V155N; A109S and F156R; A109S and F156N; A109S and F156Q; V155S and F156R; V155S and F156N; V155S and F156Q; V155N and F156R; V155N and F156N; or V155N and F156Q.

[0281] In some embodiments, any of the TadA proteins provided herein, including TadA*7.10 comprises any three of the following amino acid substitutions in a corresponding residue: F84Y, A109L, A109V, A109I, A109F, A109S, A109T, A109N, V155S, V155T, V155N, F156Y, F156W, F156R, F156N, and F156Q. In some embodiments, the three amino acid substitutions are F84Y, A109L, and V155S; F84Y, A109L, and V155N; F84Y, A109S, and V155S; F84Y, A109S, and V155N; A109L, V155S, and F156N; A109L, V155N, and F156N; A109S, V155S, and F156N; or A109S, V155N, and F156N.

[0282] In some embodiments, any of the TadA proteins provided herein, including TadA*7.10 comprises any four of the following amino acid substitutions in a corresponding residue: F84Y, A109L, A109V, A109I, A109F, A109S, A109T, A109N, V155S, V155T, V155N, F156Y, F156W, F156R, F156N, and F156Q. In some embodiments, the four amino acid substitutions are F84Y, A109L, V155S, and F156N.

[0283] In some embodiments, any of the TadA proteins provided herein, including a TadA*5, comprises any one, two, three, four, five, six, seven, eight, nine, or ten of the following amino acid substitutions in a corresponding residue: E3N, E3K, E3G, F6A, H14D, L18A, W23I, W23R, P29T, P29Y, P29Q, V35Q, L36S, N38D, G42M, N46Y, P48A, G50A, H52L, A62V, L63R, L63F, Q65R, G67N, L68V, M70I, N72Y, T79H, Y81V, V82S, M94R, G100V, V102E, V102S, R107A, A114C, G15E, M118L, D119L, H122T, P124H, P124K, P124Q, H128R, V130F, I132K, I132T, E140L, A142N, A142S, L144Q, L145R, L145N, Y147A, F149A, R152P, F156N, and K160E. In some embodiments, any of the TadA proteins provided herein, including a TadA*5, comprises two of the amino acid substitutions.

[0284] In some embodiments, the two amino acid substitutions are V1025, and G115E; G100V, and P29T; L145R, and G42M; R107A, and L63F; V82S, and E3K; V82S, and I132K; V82S, and V102E; V82S, and D119L; V82S, and L144Q; V82S, and Y147A; V82S, and M118L; V82S, and A62V; Y81V, and L18A; L145R, and G42M; K160E, and H14D; V82S, and G67N; V82S, and P124K; V35Q, and V130F; T79H, and L145N; V82S, and E3N; V82S, and I132T; V82S, and L63R; V82S, and N46Y; V82S, and F149A; V82S, and G67N; V82S, and Q65R; V82S, and M70I; V82S, and P124H; or V82S, and H52L. In some embodiments, any of the TadA proteins provided herein, including a TadA*5, comprises three of the amino acid substitutions. In some embodiments, the three amino acid substitutions are A114C, E140L, and W23I; E3G, I132T, and F6A; W23R, P48A, and R152P; V82S, G100V, and P29T; V82S, L145R, and G42M; V82S, V102S, and G115E; V82S, R107A, and L63F; N72Y, F156N, and H128R; N38D, P124Q, and L68V; P29Y, M94R, and A142N; V82S, Y81V, and L18A; V82S, L145R, and G42M; V82S, K160E, and H14D; V82S, V35Q, and V130F; or V82S, T79H, and L145N. In some embodiments, any of the TadA proteins provided herein, including a TadA*5, comprises four of the amino acid substitutions. In some embodiments, the four amino acid substitutions are V82S, A114C, E140L, and W23I; V82S, E3G, I132T, and F6A; V82S, N72Y, F156N, and H128R; V82S, N38D, P124Q, and L68V; V82S, P29Y, M94R, and A142N. In some embodiments, any of the TadA proteins provided herein, including a TadA*5, comprises five of the amino acid substitutions. In some embodiments, the five amino acid substitutions are G50A, H122T, A142S, P29Q, and L36S. In some embodiments, any of the TadA proteins provided herein, including a TadA*5, comprises six of the amino acid substitutions. In some embodiments, the six amino acid substitutions are V82S, G50A, H122T, A142S, P29Q, and L36S.

[0285] In some embodiments, a base editor described herein comprises an adenosine deaminase domain. Such an adenosine deaminase domain of a base editor can facilitate the editing of an adenine (A) nucleobase to a guanine (G) nucleobase by deaminating the A to form inosine (I), which exhibits base pairing properties of G. In some embodiments, an A-to-G base editor further comprises an inhibitor of inosine base excision repair.

[0286] A base editor comprising an adenosine deaminase can act on any polynucleotide, including DNA, RNA and DNA-RNA hybrids. In an embodiment an adenosine deaminase domain of a base editor comprises all or a portion (e.g., a functional portion) of an ADAT comprising one or more mutations which permit the ADAT to deaminate a target A in DNA. For example, the base editor can comprise all or a portion (e.g., a functional portion) of an ADAT from Escherichia coli (EcTadA) comprising one or more of the following mutations: D108N, A106V, D147Y, E155V, L84F, H123Y, I156F, or a corresponding mutation in another adenosine deaminase. Exemplary ADAT homolog polypeptide sequences are provided in the Sequence Listing as SEQ ID NOs: 1 and 309-315.

[0287] The adenosine deaminase can be derived from any suitable organism (e.g., E. coli). In some embodiments, the adenosine deaminase is from Escherichia coli, Staphylococcus aureus, Salmonella typhi, Shewanella putrefaciens, Haemophilus influenzae, Caulobacter crescentus, or Bacillus subtilis. In some embodiments, the adenine deaminase is a naturally-occurring adenosine deaminase that includes one or more mutations corresponding to any of the mutations provided herein (e.g., mutations in ecTadA). The corresponding residue in any homologous protein can be identified by e.g., sequence alignment and determination of homologous residues. The mutations in any naturally-occurring adenosine deaminase (e.g., having homology to ecTadA) that correspond to any of the mutations described herein (e.g., any of the mutations identified in ecTadA) can be generated accordingly.

[0288] In some embodiments, the adenosine deaminase comprises an amino acid sequence that is at least 60%, at least 65%, at least 70%, at least 75%, at least 80%, at least 85%, at least 90%, at least 95%, at least 96%, at least 97%, at least 98%, at least 99%, or at least 99.5% identical to any one of the amino acid sequences set forth in any of the adenosine deaminases provided herein. It should be appreciated that adenosine deaminases provided herein may include one or more mutations (e.g., any of the mutations provided herein). The disclosure provides any deaminase domains with a certain percent identify plus any of the mutations or combinations thereof described herein. In some embodiments, the adenosine deaminase comprises an amino acid sequence that has 1, 2, 3, 4, 5, 6, 7, 8, 9, 10, 11, 12, 13, 14, 15, 16, 17, 18, 19, 20, 21, 22, 21, 24, 25, 26, 27, 28, 29, 30, 31, 32, 33, 34, 35, 36, 37, 38, 39, 40, 41, 42, 43, 44, 45, 46, 47, 48, 49, 50, or more mutations compared to a reference sequence, or any of the adenosine deaminases provided herein.

[0289] It should be appreciated that any of the mutations provided herein (e.g., based on a TadA reference sequence, such as TadA*7.10 (SEQ ID NO: 1)) can be introduced into other adenosine deaminases, such as E. coli TadA (ecTadA), S. aureus TadA (saTadA), or other adenosine deaminases (e.g., bacterial adenosine deaminases). In some embodiments, the TadA reference sequence is TadA*7.10 (SEQ ID NO: 1). It would be apparent to the skilled artisan that additional deaminases may similarly be aligned to identify homologous amino acid residues that can be mutated as provided herein. Thus, any of the mutations identified in a TadA reference sequence can be made in other adenosine deaminases (e.g., ecTada) that have homologous amino acid residues. It should also be appreciated that any of the mutations provided herein can be made individually or in any combination in a TadA reference sequence or another adenosine deaminase.

[0290] In some embodiments, the adenosine deaminase comprises an alteration or set of alterations selected from those listed in Tables 5A-5E below:

TABLE 5A
Adenosine Deaminase Variants. Residue positions in the E. coli TadA variant (TadA*) are indicated.

| | 23 | 26 | 36 | 37 | 48 | 49 | 51 | 72 | 84 | 87 | 106 | 108 | 123 | 125 | 142 | 146 | 147 | 152 | 155 | 156 | 157 | 161 |
|---|---|---|---|---|---|---|---|---|---|---|---|---|---|---|---|---|---|---|---|---|---|---|
| TadA*0.1 | W | R | H | N | P | | R | N | L | S | A | D | H | G | A | S | D | R | E | I | K | K |
| TadA*0.2 | W | R | H | N | P | | R | N | L | S | A | D | H | G | A | S | D | R | E | I | K | K |
| TadA*1.1 | W | R | H | N | P | | R | N | L | S | A | N | H | G | A | S | D | R | E | I | K | K |
| TadA*1.2 | W | R | H | N | P | | R | N | L | S | V | N | H | G | A | S | D | R | E | I | K | K |
| TadA*2.1 | W | R | H | N | P | | R | N | L | S | V | N | H | G | A | S | Y | R | V | I | K | K |
| TadA*2.2 | W | R | H | N | P | | R | N | L | S | V | N | H | G | A | S | Y | R | V | I | K | K |
| TadA*2.3 | W | R | H | N | P | | R | N | L | S | V | N | H | G | A | S | Y | R | V | I | K | K |
| TadA*2.4 | W | R | H | N | P | | R | N | L | S | V | N | H | G | A | S | Y | R | V | I | K | K |
| TadA*2.5 | W | R | H | N | P | | R | N | L | S | V | N | H | G | A | S | Y | R | V | I | K | K |
| TadA*2.6 | W | R | H | N | P | | R | N | L | S | V | N | H | G | A | S | Y | R | V | I | K | K |
| TadA*2.7 | W | R | H | N | P | | R | N | L | S | V | N | H | G | A | S | Y | R | V | I | K | K |
| TadA*2.8 | W | R | H | N | P | | R | N | L | S | V | N | H | G | A | S | Y | R | V | I | K | K |
| TadA*2.9 | W | R | H | N | P | | R | N | L | S | V | N | H | G | A | S | Y | R | V | I | K | K |
| TadA*2.10 | W | R | H | N | P | | R | N | L | S | V | N | H | G | A | S | Y | R | V | I | K | K |
| TadA*2.11 | W | R | H | N | P | | R | N | L | S | V | N | H | G | A | S | Y | R | V | I | K | K |
| TadA*2.12 | W | R | H | N | P | | R | N | L | S | V | N | H | G | A | S | Y | R | V | I | K | K |
| TadA*3.1 | W | R | H | N | P | | R | N | F | S | V | N | Y | G | A | S | Y | R | V | F | K | K |
| TadA*3.2 | W | R | H | N | P | | R | N | F | S | V | N | Y | G | A | S | Y | R | V | F | K | K |
| TadA*3.3 | W | R | H | N | P | | R | N | F | S | V | N | Y | G | A | S | Y | R | V | F | K | K |
| TadA*3.4 | W | R | H | N | P | | R | N | F | S | V | N | Y | G | A | S | Y | R | V | F | K | K |
| TadA*3.5 | W | R | H | N | P | | R | N | F | S | V | N | Y | G | A | S | Y | R | V | F | K | K |
| TadA*3.6 | W | R | H | N | P | | R | N | F | S | V | N | Y | G | A | S | Y | R | V | F | K | K |
| TadA*3.7 | W | R | H | N | P | | R | N | F | S | V | N | Y | G | A | S | Y | R | V | F | K | K |
| TadA*3.8 | W | R | H | N | P | | R | N | F | S | V | N | Y | G | A | S | Y | R | V | F | K | K |
| TadA*4.1 | W | R | H | N | P | | R | N | L | S | V | N | H | G | N | S | Y | R | V | I | K | K |
| TadA*4.2 | W | G | H | N | P | | R | N | L | S | V | N | H | G | N | S | Y | R | V | I | K | K |
| TadA*4.3 | W | R | H | N | P | | R | N | F | S | V | N | Y | G | N | S | Y | R | V | F | K | K |
| TadA*5.1 | W | R | L | N | P | | L | N | F | S | V | N | Y | G | A | C | Y | R | V | F | N | K |
| TadA*5.2 | W | R | H | S | P | | R | N | F | S | V | N | Y | G | A | S | Y | R | V | F | K | T |
| TadA*5.3 | W | R | L | N | P | | L | N | I | S | V | N | Y | G | A | C | Y | R | V | F | N | K |
| TadA*5.4 | W | R | H | S | P | | R | N | F | S | V | N | Y | G | A | S | Y | R | V | F | K | T |
| TadA*5.5 | W | R | L | N | P | | L | N | F | S | V | N | Y | G | A | C | Y | R | V | F | N | K |
| TadA*5.6 | W | R | L | N | P | | L | N | F | S | V | N | Y | G | A | C | Y | R | V | F | N | K |
| TadA*5.7 | W | R | L | N | P | | L | N | F | S | V | N | Y | G | A | C | Y | R | V | F | N | K |
| TadA*5.8 | W | R | L | N | P | | L | N | F | S | V | N | Y | G | A | C | Y | R | V | F | N | K |
| TadA*5.9 | W | R | L | N | P | | L | N | F | S | V | N | Y | G | A | C | Y | R | V | F | N | K |
| TadA*5.10 | W | R | L | N | P | | L | N | F | S | V | N | Y | G | A | C | Y | R | V | F | N | K |
| TadA*5.11 | W | R | L | N | P | | L | N | F | S | V | N | Y | G | A | C | Y | R | V | F | N | K |
| TadA*5.12 | W | R | L | N | P | | L | N | F | S | V | N | Y | G | A | C | Y | R | V | F | N | K |
| TadA*5.13 | W | R | H | N | P | | L | D | F | S | V | N | Y | A | A | S | Y | R | V | F | K | K |
| TadA*5.14 | W | R | H | N | S | | L | N | F | C | V | N | Y | G | A | S | Y | R | V | F | K | K |
| TadA*6.1 | W | R | H | N | S | | L | N | F | S | V | N | Y | G | N | S | Y | R | V | F | K | K |
| TadA*6.2 | W | R | H | N | T | V | L | N | F | S | V | N | Y | G | N | S | Y | R | V | F | N | K |
| TadA*6.3 | W | R | L | N | S | | L | N | F | S | V | N | Y | G | A | C | Y | R | V | F | N | K |
| TadA*6.4 | W | R | L | N | S | | L | N | F | S | V | N | Y | G | N | C | Y | R | V | F | N | K |
| TadA*6.5 | W | R | L | N | T | V | L | N | F | S | V | N | Y | G | A | C | Y | R | V | F | N | K |
| TadA*6.6 | W | R | L | N | T | V | L | N | F | S | V | N | Y | G | N | C | Y | R | V | F | N | K |
| TadA*7.1 | W | R | L | N | A | | L | N | F | S | V | N | Y | G | A | C | Y | R | V | F | N | K |
| TadA*7.2 | W | R | L | N | A | | L | N | F | S | V | N | Y | G | N | C | Y | R | V | F | N | K |
| TadA*7.3 | L | R | L | N | A | | L | N | F | S | V | N | Y | G | A | C | Y | R | V | F | N | K |
| TadA*7.4 | R | R | L | N | A | | L | N | F | S | V | N | Y | G | A | C | Y | R | V | F | N | K |
| TadA*7.5 | W | R | L | N | A | | L | N | F | S | V | N | Y | G | A | C | Y | H | V | F | N | K |
| TadA*7.6 | W | R | L | N | A | | L | N | I | S | V | N | Y | G | A | C | Y | P | V | F | N | K |
| TadA*7.7 | L | R | L | N | A | | L | N | F | S | V | N | Y | G | A | C | Y | P | V | F | N | K |
| TadA*7.8 | L | R | L | N | A | | L | N | F | S | V | N | Y | G | N | C | Y | R | V | F | N | K |
| TadA*7.9 | L | R | L | N | A | | L | N | F | S | V | N | Y | G | N | C | Y | P | V | F | N | K |
| TadA*7.10 | R | R | L | N | A | | L | N | F | S | V | N | Y | G | A | C | Y | P | V | F | N | K |

TABLE 5B
TadA*8 Adenosine Deaminase Variants. Residue positions in the E. coli TadA variant
(TadA*) are indicated. Alterations are referenced to TadA*7.10 (first row).

| | 23 | 36 | 48 | 51 | 76 | 82 | 84 | 106 | 108 | 123 | 146 | 147 | 152 | 154 | 155 | 156 | 157 | 166 |
|---|---|---|---|---|---|---|---|---|---|---|---|---|---|---|---|---|---|---|
| TadA*7.10 | R | L | A | L | I | V | F | V | N | Y | C | Y | P | Q | V | F | N | T |
| TadA*8.1 | | | | | | | | | | | | T | | | | | | |
| TadA*8.2 | | | | | | | | | | | | R | | | | | | |
| TadA*8.3 | | | | | | | | | | | | | | S | | | | |
| TadA*8.4 | | | | | | | | | | H | | | | | | | | |
| TadA*8.5 | | | | | | S | | | | | | | | | | | | |
| TadA*8.6 | | | | | | | | | | | | | | | | | | R |
| TadA*8.7 | | | | | | | | | | | | | | R | | | | |
| TadA*8.8 | | | | | | | | | | H | | R | | R | | | | |
| TadA*8.9 | | | | | Y | | | | | | | R | | R | | | | |
| TadA*8.10 | | | | | | | | | | | | R | | R | | | | R |
| TadA*8.11 | | | | | | | | | | | | | | R | | | | |
| TadA*8.12 | | | | | | | | | | | | T | | S | | | | |
| TadA*8.13 | | | | | Y | | | | | H | | R | | R | | | | |
| TadA*8.14 | | | | | Y | S | | | | | | | | | | | | |
| TadA*8.15 | | | | | | S | | | | | | R | | | | | | |
| TadA*8.16 | | | | | | S | | | | H | | R | | | | | | |
| TadA*8.17 | | | | | | S | | | | | | | | R | | | | |
| TadA*8.18 | | | | | | S | | | | H | | | | R | | | | |
| TadA*8.19 | | | | | | S | | | | H | | R | | R | | | | |
| TadA*8.20 | | | | | Y | S | | | | H | | R | | R | | | | |
| TadA*8.21 | | | | | | | | | | | | R | | S | | | | |
| TadA*8.22 | | | | | | S | | | | | | | | S | | | | |
| TadA*8.23 | | | | | | S | | | | H | | | | | | | | |
| TadA*8.24 | | | | | | S | | | | H | | T | | | | | | |

TABLE 5C
TadA*9 Adenosine Deaminase Variants. Alterations are referenced
to TadA*7.10. Additional details of TadA*9 adenosine
deaminases are described in International PCT Application
No. PCT/US2020/049975, which is incorporated herein by
reference in its entirety for all purposes.

| TadA*9 | |
|---|---|
| Description | Alterations |
| TadA*9.1 | E25F, V82S, Y123H, T133K, Y147R, Q154R |
| TadA*9.2 | E25F, V82S, Y123H, Y147R, Q154R |
| TadA*9.3 | V82S, Y123H, P124W, Y147R, Q154R |
| TadA*9.4 | L51W, V82S, Y123H, C146R, Y147R, Q154R |
| TadA*9.5 | P54C, V82S, Y123H, Y147R, Q154R |
| TadA*9.6 | Y73S, V82S, Y123H, Y147R, Q154R |
| TadA*9.7 | N38G, V82T, Y123H, Y147R, Q154R |
| TadA*9.8 | R23H, V82S, Y123H, Y147R, Q154R |
| TadA*9.9 | R21N, V82S, Y123H, Y147R, Q154R |
| TadA*9.10 | V82S, Y123H, Y147R, Q154R, A158K |
| TadA*9.11 | N72K, V82S, Y123H, D139L, Y147R, Q154R, |
| TadA*9.12 | E25F, V82S, Y123H, D139M, Y147R, Q154R |
| TadA*9.13 | M70V, V82S, M94V, Y123H, Y147R, Q154R |
| TadA*9.14 | Q71M, V82S, Y123H, Y147R, Q154R |
| TadA*9.15 | E25F, V82S, Y123H, T133K, Y147R, Q154R |
| TadA*9.16 | E25F, V82S, Y123H, Y147R, Q154R |
| TadA*9.17 | V82S, Y123H, P124W, Y147R, Q154R |
| TadA*9.18 | L51W, V82S, Y123H, C146R, Y147R, Q154R |
| TadA*9.19 | P54C, V82S, Y123H, Y147R, Q154R |
| TadA*9.2 | Y73S, V82S, Y123H, Y147R, Q154R |
| TadA*9.21 | N38G, V82T, Y123H, Y147R, Q154R |
| TadA*9.22 | R23H, V82S, Y123H, Y147R, Q154R |
| TadA*9.23 | R21N, V82S, Y123H, Y147R, Q154R |
| TadA*9.24 | V82S, Y123H, Y147R, Q154R, A158K |
| TadA*9.25 | N72K, V82S, Y123H, D139L, Y147R, Q154R, |
| TadA*9.26 | E25F, V82S, Y123H, D139M, Y147R, Q154R |
| TadA*9.27 | M70V, V82S, M94V, Y123H, Y147R, Q154R |
| TadA*9.28 | Q71M, V82S, Y123H, Y147R, Q154R |
| TadA*9.29 | E25F, I76Y, V82S, Y123H, Y147R, Q154R |
| TadA*9.30 | I76Y, V82T, Y123H, Y147R, Q154R |
| TadA*9.31 | N38G, I76Y, V82S, Y123H, Y147R, Q154R |
| TadA*9.32 | N38G, I76Y, V82T, Y123H, Y147R, Q154R |
| TadA*9.33 | R23H, I76Y, V82S, Y123H, Y147R, Q154R |
| TadA*9.34 | P54C, I76Y, V82S, Y123H, Y147R, Q154R |
| TadA*9.35 | R21N, I76Y, V82S, Y123H, Y147R, Q154R |
| TadA*9.36 | I76Y, V82S, Y123H, D138M, Y147R, Q154R |
| TadA*9.37 | Y72S, I76Y, V82S, Y123H, Y147R, Q154R |
| TadA*9.38 | E25F, I76Y, V82S, Y123H, Y147R, Q154R |
| TadA*9.39 | I76Y, V82T, Y123H, Y147R, Q154R |
| TadA*9.40 | N38G, I76Y, V82S, Y123H, Y147R, Q154R |
| TadA*9.41 | N38G, I76Y, V82T, Y123H, Y147R, Q154R |
| TadA*9.42 | R23H, I76Y, V82S, Y123H, Y147R, Q154R |
| TadA*9.43 | P54C, I76Y, V82S, Y123H, Y147R, Q154R |
| TadA*9.44 | R21N, I76Y, V82S, Y123H, Y147R, Q154R |
| TadA*9.45 | I76Y, V82S, Y123H, D138M, Y147R, Q154R |
| TadA*9.46 | Y72S, I76Y, V82S, Y123H, Y147R, Q154R |
| TadA*9.47 | N72K, V82S, Y123H, Y147R, Q154R |
| TadA*9.48 | Q71M, V82S, Y123H, Y147R, Q154R |
| TadA*9.49 | M70V, V82S, M94V, Y123H, Y147R, Q154R |
| TadA*9.50 | V82S, Y123H, T133K, Y147R, Q154R |
| TadA*9.51 | V82S, Y123H, T133K, Y147R, Q154R, A158K |
| TadA*9.52 | M70V, Q71M, N72K, V82S, Y123H, Y147R, Q154R |
| TadA*9.53 | N72K, V82S, Y123H, Y147R, Q154R |
| TadA*9.54 | Q71M, V82S, Y123H, Y147R, Q154R |
| TadA*9.55 | M70V, V82S, M94V, Y123H, Y147R, Q154R |
| TadA*9.56 | V82S, Y123H, T133K, Y147R, Q154R |
| TadA*9.57 | V82S, Y123H, T133K, Y147R, Q154R, A158K |
| TadA*9.58 | M70V, Q71M, N72K, V82S, Y123H, Y147R, Q154R |

[0291] In some embodiments, the adenosine deaminase comprises one or more of M1I, S2A, S2E, V4D, W4E, V4M, F76S, H8E, H8Y, E9Y, M12S, R13H, R13I, R13Y, T17L, T17S, L18A, L18E, A19N, R21N, K20K, K20R, R21A, G22P, W23D), R23H, W23G, W23Q, W23L, W23R, D24E, D24G, E25F, E25M, E251D, E25A, E25G, E25R, E25V, E25S, E25Y, R26D), R26E, R26G, R26N, R26Q, R26C, R26L, R26K, R26W, E27V, E271D, P29V, V30G, L34S, L34V, L36H, H36L, H36N, N37N, N37T, N37S, N38G, N38R, W45A, W45L, W45N, N46N, R46W, R46F, R46Q, R46M, R47A, R47Q, R47F, R47K, R47P, R47W, R47M, P48T, P48L, P48A, P481, P48S, 149G, 149H, 149V, 149F, 149H, G50L, R51H, R51L, R51N, L51W, R51Y, H52D, H52Y, D53P, P54C, P54T, A55H, T55A, A56E, A56S, E59A, E59G, E591, E59Q, E59W, M61A, M61I, M61L, M61V, L63S, L63V, Q65V, G66C, G67D), G67L, G67V, L68Q, M70H, M70Q, L84F, M70V, M70L, E70A, M70V, Q71M, Q71N, Q71L, Q71R, N72A, N72K, N72S, N72D), N72Y, Y73G, Y731, Y73K, Y73R, Y73S, R74A, R74Q, R74G, R74K, R74L, R74N, I76D, I76F, I76I, I76N, I76T, I76Y, D77G, A781, T79M, L80M, L80Y, V82A, V82S, V82G, V82T, L84E, L84F, L84Y, E85K, E85G, E85P, E85S, S87C, S87L, S87V, V88A, V88M, C90S, A91A, A91G, A91S, A91V, A91T, G92T, A931, M94A, M94V, M94L, M94I, M94H, I95S, I95G, I95L, I95H, I95V, H96A, H96L, H96R, H96S, S97C, S97G, S97I, S97M, S97R, S97S, R98K, R98I, R98N, R98Q, G100R, G100V, R101V, R101R, V102A, V102F, V1021, V102V, D103A, F104G, D104N, F104V, F1041, F104L, A106T, V106Q, V106F, V106W, V106M, A106A, A106Q, A106F, A106G, A106W, A106M, A106V, A106R, R107C, R107G, R107P, R107K, R107A, R107N, R107W, R107H, R107S, D108N, D108F, D108G, D108V, D108A, D108Y, D108H, D108I, D108K, D108L, D108M, D108Q, N108Q, N108F, N108W, N108M, N108K, D108K, D108F, D108M, D108Q, D108R, D108W, D108S, A109H, A109K, A109R, A109S, A109T, A109V, K110G, K110H, K110I, K110R, K110T, T111A, T111G, T111H, T111R, G112A, A114G, A114H, A114V, G115S, L117M, L117N, L117V, M118D, M118G, M118K, M118N, M118V, D119L, D119N, D119S, D119V, V120H, V120L, H122H, H122N, H122P, H122R, H122S, H122Y, H123C, H123G, H123P, H123V, H123Y, Y123H, P124G, P1241, P124L, P124W, G125H, G125I, G125A, G125M, G125K, M126D, M126H, M126K, M126I, M126N, M126O, M126S, M126Y, N127H, N127S, N127D, N127K, N127R, H128R, R129H, R129Q, R129V, R129I, R129E, R129V, I132I, I132F, T133V, T133E, T133G, T133K, E134A, E134E, E134G, E134I, G135G, G135V, I136G, I136L, I136T, I137A, I137D, I137E, L137M, I137S, A138D, A138E, A138G, S138A, A138N, A138S, A138T, A138V, A138Y, D139E, D139I, D139C, D139L, D139M, E140A, E140C, E140L, E140R, A142N, A142D, A142G, A142A, A142L, A142S, A142T, A142N, A142S, A142V, A143D, A143E, A143G, A143D, A143G, A143E, A143L, A143W, A143M, A143S, A143Q, A143R, C146R, S146A, S146C, S146D, S146F, S146R, S146T, D147D, D147L, D147F, D147G, D147Y, Y147T, Y147R, Y147D, D147R, F148L, F148F, F148R, F148Y, F149C, F149M, F149R, F149Y, M151F, M151P, M151R, M151V, R152C, R152F, R152H, R152P, R152R, R153C, R153Q, R153R, R153V, Q154E, Q154H, Q154M, Q154R, Q154L, Q154S, Q154V, E155F, E155G, E155I, E155K, E155P, E155V, E155D, I156A, I156F, I156D, I156K, I156N, I156R, I156Y, E157A, E157F, E1571, E157P, E157T, E157V, N157K, K157N, K157R, A158Q, A158K, A158V, Q159F, Q159K, Q159L, Q159N, K160A, K160S, K160E, K160K, K160N, K161I, K161A, K161N, K161Q, K161S, K161T, A162D, A162Q, R162H, R162P, A162S, Q163G, Q163H, Q163N, Q163R, S164I, S164R, S164Y, S165A, S165D, S165I, S165T, S165Y, T166D, T166K, T166I, T166N, T166P, T166R, D167S and/or D167N mutation in a TadA reference sequence (e.g., TadA*7.10,ecTadA, or TadA8e), and any alternative mutation at the corresponding position, or any substitution from R26, W23, E27, H36, R47, P48, R51, H52, R74, 176, V82, V88, M94, 195, H96, A106, D108, A109, K110, T111, A114, D119, H122, H123, M126, N127, A142, S146, D147, F149, R152, Q154, E155, I156, E157, K161, T166, and/or D167, with respect to a TadA reference sequence, or a substitution of 2-50 amino acids in a TadA reference sequence, which may be selected from W23R, E27D, H36L, R47K, P48A, R51H, R51L, I76F, I76Y, V82S, A106V, D108G, A109S, K110R, T111H, A114V, D119N, H122R, H122N, H123Y, M126I, N127K, S146C, D147R, R152P, Q154R, E155V, I156F, K157N, K161N, T166I, and D167N, or one or more corresponding mutations in another adenosine deaminase. Additional mutations are described in U.S. Patent Application Publication No. 2022/0307003 A1 and International Patent Application Publications No. WO 2023/288304 A2 and WO 2023/034959 A2, the disclosures of which are incorporated herein by reference in their entirety for all purposes.

[0292] In embodiments, a variant of TadA*7.10 comprises one or more alterations selected from any of those alterations provided herein.

[0293] In particular embodiments, an adenosine deaminase heterodimer comprises a TadA*8 domain and an adenosine deaminase domain selected from Staphylococcus aureus (S. aureus) TadA, Bacillus subtilis (B. subtilis) TadA, Salmonella typhimurium (S. typhimurium) TadA, Shewanella putrefaciens (S. putrefaciens) TadA, Haemophilus influenzae F3031 (H. influenzae) TadA, Caulobacter crescentus (C. crescentus) TadA, Geobacter sulfurreducens (G. sulfurreducens) TadA, or TadA*7.10.

[0294] In some embodiments, the TadA*8 is a variant as shown in Table 5D. Table 5D shows certain amino acid position numbers in the TadA amino acid sequence and the amino acids present in those positions in the TadA-7.10 adenosine deaminase. Table 5D also shows amino acid changes in TadA variants relative to TadA-7.10 following phage-assisted non-continuous evolution (PANCE) and phage-assisted continuous evolution (PACE), as described in M. Richter et al., 2020, Nature Biotechnology, doi.org/10.1038/s41587-020-0453-z, the entire contents of which are incorporated by reference herein. In some embodiments, the TadA*8 is TadA*8a, TadA*8b, TadA*8c, TadA*8d, or TadA*8e. In some embodiments, the TadA*8 is TadA*8e. In one embodiment, an adenosine deaminase is a TadA*8 that comprises or consists essentially of SEQ ID NO: 316 or a fragment thereof having adenosine deaminase activity.

TABLE 5D
Select TadA*8 Variants

| | | TadA amino acid number | | | | | | | | | |
|---|---|---|---|---|---|---|---|---|---|---|---|
| | TadA | 26 | 88 | 109 | 111 | 119 | 122 | 147 | 149 | 166 | 167 |
| | TadA- | R | V | A | T | D | H | Y | F | T | D |
| | 7.10 | | | | | | | | | | |
| PANCE 1 | | | | | R | | | | | | |
| PANCE 2 | | | | S/T | R | | | | | | |
| PACE | TadA-8a | C | | S | R | N | N | D | Y | I | N |
| | TadA-8b | | A | S | R | N | N | | Y | I | N |
| | TadA-8c | C | | S | R | N | N | | Y | I | N |
| | TadA-8d | | A | | R | N | | | Y | | |
| | TadA-8e | | | S | R | N | N | D | Y | I | N |

[0295] In some embodiments, the TadA variant is a variant as shown in Table 5E. Table 5E shows certain amino acid position numbers in the TadA amino acid sequence and the amino acids present in those positions in the TadA*7.10 adenosine deaminase. In some embodiments, the TadA variant is MSP605, MSP680, MSP823, MSP824, MSP825, MSP827, MSP828, or MSP829. In some embodiments, the TadA variant is MSP828. In some embodiments, the TadA variant is MSP829.

TABLE 5E
TadA Variants

| | TadA Amino Acid Number | | | | | | | |
|---|---|---|---|---|---|---|---|---|
| Variant | 36 | 76 | 82 | 147 | 149 | 154 | 157 | 167 |
| TadA-7.10 | L | I | V | Y | F | Q | N | D |
| MSP605 | | | G | T | | S | | |
| MSP680 | | Y | G | T | | S | | |
| MSP823 | H | | G | T | | S | K | |
| MSP824 | | | G | D | Y | S | | N |
| MSP825 | H | | G | D | Y | S | K | N |
| MSP827 | H | Y | G | T | | S | K | |
| MSP828 | | Y | G | D | Y | S | | N |
| MSP829 | H | Y | G | D | Y | S | K | N |

[0296] In particular embodiments, the fusion proteins or complexes comprise a single (e.g., provided as a monomer) TadA* (e.g., TadA*8 or TadA*9). Throughout the present disclosure, an adenosine deaminase base editor that comprises a single TadA* domain is indicates using the terminology ABEm or ABE #m, where “#” is an identifying number (e.g., ABE8.20m), where “m” indicates “monomer.” In some embodiments, the TadA* is linked to a Cas9 nickase. In some embodiments, the fusion proteins or complexes of the disclosure comprise as a heterodimer of a wild-type TadA (TadA(wt)) linked to a TadA*. Throughout the present disclosure, an adenosine deaminase base editor that comprises a single TadA* domain and a TadA(wt) domain is indicates using the terminology ABEd or ABE #d, where “#” is an identifying number (e.g., ABE8.20d), where “d” indicates “dimer.” In other embodiments, the fusion proteins or complexes of the disclosure comprise as a heterodimer of a TadA*7.10 linked to a TadA*. In some embodiments, the base editor is ABE8 comprising a TadA* variant monomer. In some embodiments, the base editor is ABE comprising a heterodimer of a TadA* and a TadA(wt). In some embodiments, the base editor is ABE comprising a heterodimer of a TadA* and TadA*7.10. In some embodiments, the base editor is ABE comprising a heterodimer of a TadA*. In some embodiments, the TadA* is selected from Tables 5A-5E.

[0297] In some embodiments, the adenosine deaminase is expressed as a monomer. In other embodiments, the adenosine deaminase is expressed as a heterodimer. In some embodiments, the deaminase or other polypeptide sequence lacks a methionine, for example when included as a component of a fusion protein. This can alter the numbering of positions. However, the skilled person will understand that such corresponding mutations refer to the same mutation.

[0298] Any of the mutations provided herein and any additional mutations (e.g., based on the ecTadA amino acid sequence) can be introduced into any other adenosine deaminases. Any of the mutations provided herein can be made individually or in any combination in a TadA reference sequence or another adenosine deaminase (e.g., ecTadA).

[0299] Details of A to G nucleobase editing proteins are described in International PCT Application No. PCT/US2017/045381 (WO2018/027078) and Gaudelli, N. M., et al., “Programmable base editing of A•T to G•C in genomic DNA without DNA cleavage” Nature, 551, 464-471 (2017), the entire contents of which are hereby incorporated by reference.

### Guide Polynucleotides

[0300] A polynucleotide programmable nucleotide binding domain, when in conjunction with a bound guide polynucleotide (e.g., gRNA), can specifically bind to a target polynucleotide sequence (i.e., via complementary base pairing between bases of the bound guide nucleic acid and bases of the target polynucleotide sequence) and thereby localize the base editor to the target nucleic acid sequence desired to be edited. In some embodiments, the target polynucleotide sequence comprises single-stranded DNA or double-stranded DNA. In some embodiments, the target polynucleotide sequence comprises RNA. In some embodiments, the target polynucleotide sequence comprises a DNA-RNA hybrid.

[0301] In an embodiment, a guide polynucleotide described herein can be RNA or DNA. In one embodiment, the guide polynucleotide is a gRNA.

[0302] In some embodiments, the guide polynucleotide is at least one single guide RNA (“sgRNA” or “gRNA”). In some embodiments, a guide polynucleotide comprises two or more individual polynucleotides, which can interact with one another via for example complementary base pairing (e.g., a dual guide polynucleotide, dual gRNA). For example, a guide polynucleotide can comprise a CRISPR RNA (crRNA) and a trans-activating CRISPR RNA (tracrRNA) or can comprise one or more trans-activating CRISPR RNA (tracrRNA).

[0303] A guide polynucleotide may include natural or non-natural (or unnatural) nucleotides (e.g., peptide nucleic acid or nucleotide analogs). In some cases, the targeting region of a guide nucleic acid sequence (e.g., a spacer) can be at least 15, 16, 17, 18, 19, 20, 21, 22, 23, 24, 25, 26, 27, 28, 29, or 30 nucleotides in length.

In some embodiments, the methods described herein can utilize an engineered Cas protein. A guide RNA (gRNA) is a short synthetic RNA composed of a scaffold sequence necessary for Cas-binding and a user-defined ˜20 nucleotide spacer that defines the genomic target to be modified. Exemplary gRNA scaffold sequences are provided in the sequence listing as SEQ ID NOs: 317-327 and 425. Thus, a skilled artisan can change the genomic target of the Cas protein specificity is partially determined by how specific the gRNA targeting sequence is for the genomic target compared to the rest of the genome. In embodiments, the spacer is about 10, 11, 12, 13, 14, 15, 16, 17, 18, 19, 20, 22, 23, 24, 25, or more nucleotides in length. The spacer of a gRNA can be or can be about 19, 20, or 21 nucleotides in length.

[0304] A gRNA or a guide polynucleotide can target any exon or intron of a gene target. In some embodiments, a composition comprises multiple gRNAs that all target the same exon or multiple gRNAs that target different exons. An exon and/or an intron of a gene can be targeted. A gRNA or a guide polynucleotide can target a nucleic acid sequence of about 20 nucleotides or less than about 20 nucleotides (e.g., at least about 5, 10, 15, 16, 17, 18, 19, 20, 21, 22, 23, 24, 25, 30 nucleotides), or anywhere between about 1-100 nucleotides (e.g., 5, 10, 15, 16, 17, 18, 19, 20, 21, 22, 23, 24, 25, 30, 40, 50, 60, 70, 80, 90, 100). A target nucleic acid sequence can be or can be about 20 bases immediately 5′ of the first nucleotide of the PAM. A gRNA can target a nucleic acid sequence. A target nucleic acid can be at least or at least about 1-10, 1-20, 1-30, 1-40, 1-50, 1-60, 1-70, 1-80, 1-90, or 1-100 nucleotides.

[0305] The guide polynucleotides can comprise standard ribonucleotides, modified ribonucleotides (e.g., pseudouridine), ribonucleotide isomers, and/or ribonucleotide analogs.

[0306] In some embodiments, a base editor system may comprise multiple guide polynucleotides, e.g., gRNAs. For example, the gRNAs may target to one or more target loci (e.g., at least 1 gRNA, at least 2 gRNA, at least 5 gRNA, at least 10 gRNA, at least 20 gRNA, at least 30 g RNA, at least 50 gRNA) comprised in a base editor system. The multiple gRNA sequences can be tandemly arranged and may be separated by a direct repeat.

[0307] Some aspects of the disclosure provide guide RNAs (e.g., single guide RNAs) comprising a sequence (e.g., a targeting sequence) that is complementary to an alpha-1 antitrypsin nucleic acid sequence comprising a SNP associated with alpha-1 antytrypsin deficiency. In some embodiments, the gRNA comprises the nucleic acid sequence (e.g., targeting sequence): ACCAUCGACAAGAAAGGGACUGA (SEQ ID NO: 466), CCAUCGACAAGAAAGGGACUGA (SEQ ID NO: 467), CAUCGACAAGAAAGGGACUGA (SEQ ID NO: 469), AUCGACAAGAAAGGGACUGA (SEQ ID NO: 468), CAUCGACAAGAAAGGGACUGA (SEQ ID NO: 469), AUCGACAAGAAAGGGACUGA (SEQ ID NO: 434) or a variant thereof comprising one or more modifications. In some embodiments, the gRNA comprises the nucleic acid sequence (e.g., targeting sequence): AUCGACAAGAAAGGGACUGA (SEQ ID NO: 434), CAUCGACAAGAAAGGGACUGA (SEQ ID NO: 469), or a variant thereof comprising one or more modifications.

In some embodiments, the gRNA further comprises the nucleic acid sequence (e.g., a scaffold sequence): 5′-GUUUUAGAGC UAGAAAUAGC AAGUUAAAAU AAGGCUAGUC CGUUAUCAAC UUGAAAAAGU GGCACCGAGU CGGUGCUUUU-3′ (SEQ ID NO: 317), or any variant thereof (e.g., as provided herein).

[0308] In some embodiments any of the gRNAs provided herein comprise one or more modifications. Exemplary modifications are provided herein (e.g., in the Modified Polynucleotides section). Exemplary gRNAs designed to target an alpha-1 antitrypsin nucleic acid sequence comprising a SNP associated with alpha-1 antytrypsin deficiency are provided below. It should be appreciated that the exemplary guides and modifications thereof are not intended to be limiting. In the following guide sequences, “N” represents any nucleotide, “mN” indicates a 2′-OMe modification of the nucleotide “N”, fN indicates a 2′-fluoro(F) modification of the nucleotide “N,” and “Ns” indicates that the nucleotide “N” is linked to the following nucleotide by a phosphorothioate (PS):

```
  (SEQ ID NO: 569)
mAsmUsmCsGACAAGAAAGGGACUGAGUUUUAGAGCUAGAAAUAGCAAGUUAAAAUAAGGCU
AGUCCGUUAUCAACUUGAAAAAGUGGCACCGAGUCGGUGCmUsmUsmUsU (gRNA025)
  (SEQ ID NOs: 570 and 543))
mAsmUsmCsGACAAGAAAGGGACUGAGUUUUAGAGCUAGAAAUAGCAAGUUAAAAUAAGGCU
AGUCCGUUAUCAACUUGAAAAAGUGGCACCGAGUCGGUGCUsmUsmUsmU-
CKRTADGSEFESPKKKRKV (sgRNA056)
  (SEQ ID NO: 571)
mAsmUsmCsmGmAmCmAmAmGmAfAfAfGIGGsAsfCfUGsmAmGUsUsUsfUfAmGmAmGm
CmUmAmGmAmAmAmUmAmGmCmAmAmGUUmAAmAmAUmAmAmGmGCUmAGUCmCGUUmAmUm
CmAmAmCmUmUmGmAmAmAmAmAmGmUmGmGmCmAmCmCmGmAmGmUmCmGmGmUmGmCsmU
smUsmU (sgRNA058)
  (SEQ ID NO: 572)
mAsmUsmCsGACAAGAAAGGGACUGAmGUUUUAGmAmGmCmUmAmGmAmAmAmUmAmGmCmA
mAGUUmAAmAAmUAmAmGmGmCmUmAGUmCmCGUUAmUmCAAmCmUmUmGmAmAmAmAmAmG
mUmGGmCmAmCmCmGmAmGmUmCmGmGmUmGmCmUsmUsmUsmU (sgRNA086)
(SEQ ID NO: 573)
mCsmAsmUsCGACAAGAAAGGGACUGAGUUUUAGAGCUAGAAAUAGCAAGUUAAAAUAAGGC
UAGUCCGUUAUCAACUUGAAAAAGUGGCACCGAGUCGGUGCmUsmUsmUsU (sgRNA182)
  (SEQ ID NO: 574)
mAsmUsmCsmGmAmCmAmAmGmAfAfAfGfGGsAsfCUGmAmGUSUUfUfAmGmAmGmCmUm
AmGmAmAmAmUmAmGmCmAmAmGUUmAAmAmAUmAmAmGmGCUmAGUCmCGUUmAmUmCmAm
AmCmUmUmGmAmAmAmAmAmGUGmGmCmAmCmCmGmAmGmUmCmGmGmUmGmCsmUsmU
smU (gRNA855)
  (SEQ ID NO: 575)
mAsmUsmCsGACAAGAAAGGGACUGAmGUUUUAGmAmGmCmUmAmGmAmAmAmUmAmGmCmA
mAGUUmAAmAAmUAmAmGmGmCmUmAGUmCmCGUUAmUmCAAmCmUmUmGmAmAmAmAmAmG
UGGmCmAmCmCmGmAmGmUmCmGmGmUmGmCmUsmUsmUsmU (gRNA856)
(SEQ ID NO: 576)
mAsmUsmCsmGmAmCmAmAmGmAAAGGGACUGmAmGUUUUAmGmAmGmCmUmAmGmAmAmAm
UmAmGmCmAmAmGUUmAAmAmAUmAmAmGmGCUmAGUCmCGUUmAmUmCmAmAmCmUmUmGm
AmAmAmAmAmGUGmGmCmAmCmCmGmAmGmUmCmGmGmUmGmCsmUsmUsmU (gRNA857)
  (SEQ ID NO: 577)
mAsmUsmCsmGmAmCmAmAmGmAAAGGGACUGAmGUUUUAGmAmGmCmUmAmGmAmAmAmUm
AmGmCmAmAGUUmAAmAAmUAmAmGmGmCmUmAGUmCmCGUUAmUmCAAmCmUmUmGmAmAm
AmAmAmGUGGmCmAmCmCmGmAmGmUmCmGmGmUmGmCmUsmUsmUsmU (gRNA1447)
(SEQ ID NO: 578)
mCsmAsmUsmCmGmAmCmAmAmGmAAAGGGACUGAmGUUUUAGmAmGmCmUmAmGmAmAmAm
UmAmGmCmAmAGUUmAAmAAmUAmAmGmGmCmUmAGUmCmCGUUAmUmCAAmCmUmUmGmAm
AmAmAmAmGUGGmCmAmCmCmGmAmGmUmCmGmGmUmGmCmUsmUsmUsmU (gRNA1448)
(SEQ ID NO: 579)
mAsmUsmCsmGmAmCmAmAmGmAmAAmGmGGAmCUGmAmGUUUUAGmAmGmCmUmAmGmAmA
mAmUmAmGmCmAmAGUUmAAmAAmUAmAmGmGmCmUmAGUmCmCGUUAmUmCAAmCmUmUmG
mAmAmAmAmAmGUGGmCmAmCmCmGmAmGmUmCmGmGmUmGmCmUsmUsmUsmU (gRNA1449)
  (SEQ ID NO: 580)
mCsmAsmUsmCmGmAmCmAmAmGmAmAAmGmGGAmCUGmAmGUUUUAGmAmGmCmUmAmGmA
mAmAmUmAmGmCmAmAGUUmAAmAAmUAmAmGmGmCmUmAGUmCmCGUUAmUmCAAmCmUmU
mGm.AmAmAmAmAmGUGGmCmAmCmCmGmAmGmUmCmGmGmUmGmCmUsmUsmUs
mU (gRNA1450)
  (SEQ ID NO: 581)
mCsmAsmUsCGACAAGAAAGGGACUGAmGUUUUAGmAmGmCmUmAmGmAmAmAmUmAmGmCm
AmAGUUmAAmAAmUAmAmGmGmCmUmAGUmCmCGUUAmUmCAAmCmUmUmGmAmAmAmAmAm
GUGGmCmAmCmCmGmAmGmUmCmGmGmUmGmCmUsmUsmUsmU (gRNA1451)
  (SEQ ID NO: 582)
mAsmUsmCsGACAAGAAAGGGACUGAGUUUUAGAmGmCmCmGmGmCmGmGmAmAmAmCmGmC
mCmGmGmCAAGUUAAAAUAAGGCUAGUCCGUUAUCAmAmCmUmUmGmAmAmAmAmAmGmUmG
mGmCmAmCmCmGmAmGmUmCmGmGmUmGmCmUsmUsmUsmU (gRNA1071)
  (SEQ ID NO: 583)
mAsmUsmCsmGmAmCmAmAmGmAAAGGGACUGAGUUUUAGAmGmCmCmGmGmCmGmGmAmAm
AmCmGmCmCmGmGmCAAGUUAAAAUAAGGCUAGUCCGUUAUCAmAmCmUmUmGmAmAmAmAm
AmGmUmGmGmCmAmCmCmGmAmGmUmCmGmGmUmGmCmUsmUsmUsmU (gRNA1850)
  (SEQ ID NO: 584)
mAsmUsmCsGACAAGAAAGGGACUGAGUUUUAGAmGmCmUmAmGmAmAmAmUmAmGmCAAGU
UAAAAUAAGGCUAGUCCGUUAmUmCAAmCmUmUGGACUUCGGUCCmAmAmGmUmGGmCmAmC
mCmGmAmGmUmCmGmGmUmGmCmUsmUsmUsmU (gRNA1851)
  (SEQ ID NO: 585)
mAsmUsmCsGACAAGAAAGGGACUGAGUUUUAGAmGmCmCmGmGmCmGmGmAmAmAmCmGmC
mCmGmGmCAAGUUAAAAUAAGGCUAGUCCGUUAmUmCAAmCmUmUGGACUUCGGUCCmAmAm
GmUmGGmCmAmCmCmGmAmGmUmCmGmGmUmGmCmUmUmUmU (gRNA1852)
```

### Modified Polynucleotides

[0309] To enhance expression, stability, and/or genomic/base editing efficiency, and/or reduce possible toxicity, the base editor-coding sequence (e.g., mRNA) and/or the guide polynucleotide (e.g., gRNA) can be modified to include one or more modified nucleotides and/or chemical modifications, e.g. using pseudo-uridine, 5-Methyl-cytosine, 2′-O-methyl-3′-phosphonoacetate, 2′-O-methyl thioPACE (MSP), 2′-O-methyl-PACE (MP), 2′-fluoro RNA (2′-F-RNA), =constrained ethyl (S-cEt), 2′-O-methyl (‘M’), 2′-O-methyl-3′-phosphorothioate (‘MS’), 2′-O-methyl-3′-thiophosphonoacetate (‘MSP’), 5-methoxyuridine, phosphorothioate, and N1-Methylpseudouridine. Chemically protected gRNAs can enhance stability and editing efficiency in vivo and ex vivo. Methods for using chemically modified mRNAs and guide RNAs are known in the art and described, for example, by Jiang et al., Chemical modifications of adenine base editor mRNA and guide RNA expand its application scope. Nat Commun 11, 1979 (2020). doi.org/10.1038/s41467-020-15892-8, Callum et al., N1-Methylpseudouridine substitution enhances the performance of synthetic mRNA switches in cells, Nucleic Acids Research, Volume 48, Issue 6, 6 Apr. 2020, Page e35, and Andries et al., Journal of Controlled Release, Volume 217, 10 Nov. 2015, Pages 337-344, each of which is incorporated herein by reference in its entirety.

[0310] In some embodiments, the guide polynucleotide comprises one or more modified nucleotides at the 5′ end and/or the 3′ end of the guide. In some embodiments, the guide polynucleotide comprises two, three, four or more modified nucleosides at the 5′ end and/or the 3′ end of the guide. In some embodiments, the guide polynucleotide comprises two, three, four or more modified nucleosides at the 5′ end and/or the 3′ end of the guide.

[0311] In some embodiments, the guide comprises at least about 50%-75% modified nucleotides. In some embodiments, the guide comprises at least about 85% or more modified nucleotides. In some embodiments, at least about 1-5 nucleotides at the 5′ end of the gRNA are modified and at least about 1-5 nucleotides at the 3′ end of the gRNA are modified. In some embodiments, at least about 3-5 contiguous nucleotides at each of the 5′ and 3′ termini of the gRNA are modified. In some embodiments, at least about 20% of the nucleotides present in a direct repeat or anti-direct repeat are modified. In some embodiments, at least about 50% of the nucleotides present in a direct repeat or anti-direct repeat are modified. In some embodiments, at least about 50-75% of the nucleotides present in a direct repeat or anti-direct repeat are modified. In some embodiments, at least about 100 of the nucleotides present in a direct repeat or anti-direct repeat are modified. In some embodiments, at least about 20% or more of the nucleotides present in a hairpin present in the gRNA scaffold are modified. In some embodiments, at least about 50% or more of the nucleotides present in a hairpin present in the gRNA scaffold are modified. In some embodiments, the guide comprises a variable length spacer. In some embodiments, the guide comprises a 20-40 nucleotide spacer. In some embodiments, the guide comprises a spacer comprising at least about 20-25 nucleotides or at least about 30-35 nucleotides. In some embodiments, the spacer comprises modified nucleotides. In some embodiments, the guide comprises two or more of the following:
[0312] at least about 1-5 nucleotides at the 5′ end of the gRNA are modified and at least about 1-5 nucleotides at the 3′ end of the gRNA are modified;
[0313] at least about 20% of the nucleotides present in a direct repeat or anti-direct repeat are modified;
[0314] at least about 50-75% of the nucleotides present in a direct repeat or anti-direct repeat are modified;
[0315] at least about 20% or more of the nucleotides present in a hairpin present in the gRNA scaffold are modified;
[0316] a variable length spacer; and
[0317] a spacer comprising modified nucleotides.

[0318] In embodiments, the gRNA contains numerous modified nucleotides and/or chemical modifications. Such modifications may increase base editing ˜2 fold in vivo or in vitro. In embodiments, the gRNA comprises 2′-O-methyl or phosphorothioate modifications. In an embodiment, the gRNA comprises 2′-O-methyl and phosphorothioate modifications. In an embodiment, the modifications increase base editing by at least about 2 fold. In some embodiments, the disclosure provides gRNAs that comprise 2′-O-methyl or phosphorothioate modifications other than, or in addition to, the three nucleotides at the 5′ and 3′ end of the gRNA. In some embodiments at least 40%, 45%, 47%, 50%, 55%, 60%, 65%, 70%, 75%, 80%, 85%, 88%, 90%, 91%, 92%, 93%, 94%, 95%, 96%, 97%, 98%, 99%, or 100% of the nucleotides of a gRNA comprise a 2′-O-methyl or phosphorothioate modification.

[0319] A guide polynucleotide can comprise one or more modifications to provide a nucleic acid with a new or enhanced feature. A guide polynucleotide can comprise a nucleic acid affinity tag. A guide polynucleotide can comprise synthetic nucleotide, synthetic nucleotide analog, nucleotide derivatives, and/or modified nucleotides.

[0320] A gRNA or a guide polynucleotide can also be modified by 5′ adenylate, 5′ guanosine-triphosphate cap, 5′ N7-Methylguanosine-triphosphate cap, 5′ triphosphate cap, 3′ phosphate, 3′ thiophosphate, 5′ phosphate, 5′ thiophosphate, Cis-Syn thymidine dimer, trimers, C12 spacer, C3 spacer, C6 spacer, dSpacer, PC spacer, rSpacer, Spacer 18, Spacer 9, 3′-3′ modifications, 2′-O-methyl thioPACE (MSP), 2′-O-methyl-PACE (MP), and constrained ethyl (S-cEt), 5′-5′ modifications, abasic, acridine, azobenzene, biotin, biotin BB, biotin TEG, cholesteryl TEG, desthiobiotin TEG, DNP TEG, DNP-X, DOTA, dT-Biotin, dual biotin, PC biotin, psoralen C2, psoralen C6, TINA, 3′ DABCYL, black hole quencher 1, black hole quencher 2, DABCYL SE, dT-DABCYL, IRDye QC-1, QSY-21, QSY-35, QSY-7, QSY-9, carboxyl linker, thiol linkers, 2′-deoxyribonucleoside analog purine, 2′-deoxyribonucleoside analog pyrimidine, ribonucleoside analog, 2′-O-methyl ribonucleoside analog, sugar modified analogs, wobble/universal bases, fluorescent dye label, 2′-fluoro RNA, 2′-O-methyl RNA, methylphosphonate, phosphodiester DNA, phosphodiester RNA, phosphothioate DNA, phosphorothioate RNA, UNA, pseudouridine-5′-triphosphate, 5′-methylcytidine-5′-triphosphate, or any combination thereof.

[0321] In some cases, a phosphorothioate enhanced RNA gRNA can inhibit RNase A, RNase T1, calf serum nucleases, or any combinations thereof. These properties can allow the use of PS-RNA gRNAs to be used in applications where exposure to nucleases is of high probability in vivo or in vitro. For example, phosphorothioate (PS) bonds can be introduced between the last 3-5 nucleotides at the 5′- or 3′-end of a gRNA which can inhibit exonuclease degradation. In some cases, phosphorothioate bonds can be added throughout an entire gRNA to reduce attack by endonucleases.

[0322] In some embodiments, a guide polynucleotide of the disclosure contains a scaffold with one of the following chemical modification schemes, where “N” represents any nucleotide, “mN” indicates a 2′-OMe modification of the nucleotide “N”, and “Ns” indicates that the nucleotide “N” is linked to the following nucleotide by a phosphorothioate (PS):

```
End-modSpCas9 guide polynucleotide
  (SEQ ID NO: 487)
mNsmNsmNsNNNNNNNNNNNNNNNNNGUUUUAGAGCUAGAAAUAGCAAGUUAAAAUAAGGCU
AGUCCGUUAUCAACUUGAAAAAGUGGCACCGAGUCGGUGCUsmUsmUsmU
End-mod SaCas9 guide polynucleotide
(SEQ ID NO: 488)
mNsmNsmNsNNNNNNNNNNNNNNNNNNGUUUUAGUACUCUGUAAUGAAAAUUACAGAAUCUA
CUAAAACAAGGCAAAAUGCCGUGUUUAUCUCGUCAACUUGUUGGCGAGAUsmUsmUsmU
HM01:
  (SEQ ID NO: 489)
mNsmNsmNsNNNNNNNNNNNNNNNNNGUUUUAGAmGmCmUmAmGmAmAmAmUmAmGmCAAGU
UAAAAUAAGGCUAGUCCGUUAUCAmAmCmUmUmGmAmAmAmAmAmGmUmGmGmCmAmCmCmG
mAmGmUmCmGmGmUmGmCmUsmUsmUsmU
HM07:
  (SEQ ID NO: 490)
mNsmNsmNsmNmNmNmNmNmNmNNNNNNNNNNNmGUUUUAGmAmGmCmUmAmGmAmAmAmUm
AmGmCmAmAGUUmAAmAAmUAmAmGmGmCmUmAGUmCmCGUUAmUmCAAmCmUmUmGmAmAm
AmAmAmGmUmGGmCmAmCmCmGmAmGmUmCmGmGmUmGmCmUsmUsmUsmU
NLS (bpsv40):
  (SEQ ID NOs: 491 and 543)
mNsmNsmNsNNNNNNNNNNNNNNNNNGUUUUAGAGCUAGAAAUAGCAAGUUAAAAUAAGGCU
AGUCCGUUAUCAACUUGAAAAAGUGGCACCGAGUCGGUGCmUsmUsmUsmU-NHC6-CrossL-
ac-CKRTADGSEFESPKKKRKV
LONGEST:
  (SEQ ID NO: 493)
mNsmNsmNsNNNNNNNNNNNNNNNNNGUUUUAGAmGmCmCmGmGmCmGmGmAmAmAmCmGmC
mCmGmGmCAAGUUAAAAUAAGGCUAGUCCGUUAUCAmAmCmUmUmGmAmAmAmAmAmGUGmG
mCmAmCmCmGmAmGmUmCmGmGmUmGmCmUsmUsmUsmU
NLS + LONGEST:
  (SEQ ID NOs: 494 and 543)
mNsmNsmNsNNNNNNNNNNNNNNNNNGUUUUAGAmGmCmCmGmGmCmGmGmAmAmAmCmGmC
mCmGmGmCAAGUUAAAAUAAGGCUAGUCCGUUAUCAmAmCmUmUmGmAmAmAmAmAmGmUmG
mGmCmAmCmCmGmAmGmUmCmGmGmUmGmCmUsmUsmUsmU-NHC5-CrossL-
CKRTADGSEFESPKKKRKV
LONGEST + GOLD:
  (SEQ ID NO: 496)
mNsmNsmNsNNNNNNNNNNNNNNNNNGUUUUAGAmGmCmCmGmGmCmGmGmAmAmAmCmGmC
mCmGmGmCAAGUUAAAAUAAGGCUAGUCCGUUAmUmCAAmCmUmUGGACUUCGGUCCmAmAm
GUGGmCmAmCmCmGmAmGmUmCmGmGmUmGmCmUsmUsmUsmU
```

### Fusion Proteins or Complexes Comprising a Nuclear Localization Sequence (NLS)

[0323] In some embodiments, the fusion proteins or complexes provided herein further comprise one or more (e.g., 2, 3, 4, 5) nuclear targeting sequences, for example a nuclear localization sequence (NLS). In one embodiment, a bipartite NLS is used. In some embodiments, a NLS comprises an amino acid sequence that facilitates the importation of a protein, that comprises an NLS, into the cell nucleus (e.g., by nuclear transport). In some embodiments, the NLS is fused to the N-terminus or the C-terminus of the fusion protein. In some embodiments, the NLS is fused to the C-terminus or N-terminus of an nCas9 domain or a dCas9 domain. In some embodiments, the NLS is fused to the N-terminus or C-terminus of the Cas12 domain. In some embodiments, the NLS is fused to the N-terminus or C-terminus of the cytidine or adenosine deaminase. In some embodiments, the NLS is fused to the fusion protein via one or more linkers. In some embodiments, the NLS is fused to the fusion protein without a linker. In some embodiments, the NLS comprises an amino acid sequence of any one of the NLS sequences provided or referenced herein. Additional nuclear localization sequences are known in the art and would be apparent to the skilled artisan. For example, NLS sequences are described in Plank et al., PCT/EP2000/011690, the contents of which are incorporated herein by reference for their disclosure of exemplary nuclear localization sequences.

[0324] In some embodiments, the NLS is present in a linker or the NLS is flanked by linkers, for example described herein. A bipartite NLS comprises two basic amino acid clusters, which are separated by a relatively short spacer sequence (hence bipartite—2 parts, while monopartite NLSs are not). The NLS of nucleoplasmin, KR [PAATKKAGQA] KKKK (SEQ ID NO: 191), is the prototype of the ubiquitous bipartite signal: two clusters of basic amino acids, separated by a spacer of about 10 amino acids. The sequence of an exemplary bipartite NLS follows:

(SEQ ID NO: 328)
PKKKRKVEGADKRTADGSEFESPKKKRKV.

[0325] In some embodiments, any of the fusion proteins or complexes provided herein comprise an NLS comprising the amino acid sequence EGADKRTADGSEFESPKKKRKV (amino acids 8 to 29 of SEQ ID NO: 328). In some embodiments, any of the adenosine base editors provided herein, for example ABE Variant A, ABE Variant B, ABE Variant C, ABE Variant D, ABE Variant E, ABE Variant F, ABE Variant G, ABE Variant H, ABE Variant I, ABE Variant J, ABE Variant K, or ABE Variant D comprise an NLS comprising the amino acid sequence EGADKRTADGSEFESPKKKRKV (amino acids 8 to 29 of SEQ ID NO: 328). In some embodiments, the NLS is at a C-terminal portion of the adenosine base editor. In some embodiments, the NLS is at the C-terminus of the adenosine base editor.

### Additional Domains

[0326] A base editor described herein can include any domain which helps to facilitate the nucleobase editing, modification or altering of a nucleobase of a polynucleotide. In some embodiments, a base editor comprises a polynucleotide programmable nucleotide binding domain (e.g., Cas9), a nucleobase editing domain (e.g., deaminase domain), and one or more additional domains. In some embodiments, the additional domain can facilitate enzymatic or catalytic functions of the base editor, binding functions of the base editor, or be inhibitors of cellular machinery (e.g., enzymes) that could interfere with the desired base editing result. In some embodiments, a base editor comprises a nuclease, a nickase, a recombinase, a deaminase, a methyltransferase, a methylase, an acetylase, an acetyltransferase, a transcriptional activator, or a transcriptional repressor domain.

### Base Editor System

[0327] Provided herein are systems, compositions, and methods for editing a nucleobase using a base editor system. In some embodiments, the base editor system comprises (1) a base editor (BE) comprising a polynucleotide programmable nucleotide binding domain and a nucleobase editing domain (e.g., a deaminase domain) for editing the nucleobase; and (2) a guide polynucleotide (e.g., guide RNA) in conjunction with the polynucleotide programmable nucleotide binding domain. In some embodiments, the base editor system is an adenosine base editor (ABE). In some embodiments, the polynucleotide programmable nucleotide binding domain is a polynucleotide programmable DNA or RNA binding domain. In some embodiments, the nucleobase editing domain is a deaminase domain. In some embodiments, a deaminase domain can be an adenine deaminase or an adenosine deaminase. In some embodiments, the adenosine base editor can deaminate adenine in DNA. In some embodiments, the base editor is capable of deaminating a cytidine in DNA.

[0328] Use of the base editor system provided herein comprises the steps of (a) contacting a target nucleotide sequence of a polynucleotide (e.g., double- or single stranded DNA or RNA) of a subject with a base editor system comprising a nucleobase editor (e.g., an adenosine base editor or a cytidine base editor) and a guide polynucleotide (e.g., gRNA), wherein the target nucleotide sequence comprises a targeted nucleobase pair; (b) inducing strand separation of said target region; (c) converting a first nucleobase of said target nucleobase pair in a single strand of the target region to a second nucleobase; and (d) cutting no more than one strand of said target region, where a third nucleobase complementary to the first nucleobase base is replaced by a fourth nucleobase complementary to the second nucleobase. It should be appreciated that in some embodiments, step (b) is omitted. In some embodiments, said targeted nucleobase pair is a plurality of nucleobase pairs in one or more genes. In some embodiments, the base editor system provided herein is capable of multiplex editing of a plurality of nucleobase pairs in one or more genes. In some embodiments, the plurality of nucleobase pairs is located in the same gene. In some embodiments, the plurality of nucleobase pairs is located in one or more genes, wherein at least one gene is located in a different locus.

[0329] The components of a base editor system (e.g., a deaminase domain, a guide RNA, and/or a polynucleotide programmable nucleotide binding domain) may be associated with each other covalently or non-covalently. For example, in some embodiments, the deaminase domain can be targeted to a target nucleotide sequence by a polynucleotide programmable nucleotide binding domain, optionally where the polynucleotide programmable nucleotide binding domain is complexed with a polynucleotide (e.g., a guide RNA). In some embodiments, a polynucleotide programmable nucleotide binding domain can be fused or linked to a deaminase domain. In some embodiments, a polynucleotide programmable nucleotide binding domain can target a deaminase domain to a target nucleotide sequence by non-covalently interacting with or associating with the deaminase domain. For example, in some embodiments, the nucleobase editing component (e.g., the deaminase component) comprises an additional heterologous portion or domain that is capable of interacting with, associating with, or capable of forming a complex with a corresponding heterologous portion, antigen, or domain that is part of a polynucleotide programmable nucleotide binding domain and/or a guide polynucleotide (e.g., a guide RNA) complexed therewith. In some embodiments, the polynucleotide programmable nucleotide binding domain, and/or a guide polynucleotide (e.g., a guide RNA) complexed therewith, comprises an additional heterologous portion or domain that is capable of interacting with, associating with, or capable of forming a complex with a corresponding heterologous portion, antigen, or domain that is part of a nucleobase editing domain (e.g., the deaminase component). In some embodiments, the additional heterologous portion may be capable of binding to, interacting with, associating with, or forming a complex with a polypeptide. In some embodiments, the additional heterologous portion may be capable of binding to, interacting with, associating with, or forming a complex with a polynucleotide. In some embodiments, the additional heterologous portion may be capable of binding to a guide polynucleotide. In some embodiments, the additional heterologous portion may be capable of binding to a polypeptide linker. In some embodiments, the additional heterologous portion is capable of binding to a polynucleotide linker. An additional heterologous portion may be a protein domain. In some embodiments, an additional heterologous portion comprises a polypeptide, such as a 22 amino acid RNA-binding domain of the lambda bacteriophage antiterminator protein N (N22p), a 2G12 IgG homodimer domain, an ABI, an antibody (e.g. an antibody that binds a component of the base editor system or a heterologous portion thereof) or fragment thereof (e.g. heavy chain domain 2 (CH2) of IgM (MHD2) or IgE (EHD2), an immunoglobulin Fc region, a heavy chain domain 3 (CH3) of IgG or IgA, a heavy chain domain 4 (CH4) of IgM or IgE, an Fab, an Fab2, miniantibodies, and/or ZIP antibodies), a bamase-barstar dimer domain, a Bcl-xL domain, a Calcineurin A (CAN) domain, a Cardiac phospholamban transmembrane pentamer domain, a collagen domain, a Com RNA binding protein domain (e.g. SfMu Com coat protein domain, and SfMu Com binding protein domain), a Cyclophilin-Fas fusion protein (CyP-Fas) domain, a Fab domain, an Fc domain, a fibritin foldon domain, an FK506 binding protein (FKBP) domain, an FKBP binding domain (FRB) domain of mTOR, a foldon domain, a fragment X domain, a GAI domain, a GID1 domain, a Glycophorin A transmembrane domain, a GyrB domain, a Halo tag, an HIV Gp41 trimerisation domain, an HPV45 oncoprotein E7 C-terminal dimer domain, a hydrophobic polypeptide, a K Homology (KH) domain, a Ku protein domain (e.g., a Ku heterodimer), a leucine zipper, a LOV domain, a mitochondrial antiviral-signaling protein CARD filament domain, an MS2 coat protein domain (MCP), a non-natural RNA aptamer ligand that binds a corresponding RNA motif/aptamer, a parathyroid hormone dimerization domain, a PP7 coat protein (PCP) domain, a PSD95-Dlgl-zo-1 (PDZ) domain, a PYL domain, a SNAP tag, a SpyCatcher moiety, a SpyTag moiety, a streptavidin domain, a streptavidin-binding protein domain, a streptavidin binding protein (SBP) domain, a telomerase Sm7 protein domain (e.g. Sm7 homoheptamer or a monomeric Sm-like protein), and/or fragments thereof. In embodiments, an additional heterologous portion comprises a polynucleotide (e.g., an RNA motif), such as an MS2 phage operator stem-loop (e.g., an MS2, an MS2 C-5 mutant, or an MS2 F-5 mutant), a non-natural RNA motif, a PP7 operator stem-loop, an SfMu phate Com stem-loop, a steril alpha motif, a telomerase Ku binding motif, a telomerase Sm7 binding motif, and/or fragments thereof. Non-limiting examples of additional heterologous portions include polypeptides with at least about 85% sequence identity to any one or more of SEQ ID NOs: 380, 382, 384, 386-388, or fragments thereof. Non-limiting examples of additional heterologous portions include polynucleotides with at least about 85% sequence identity to any one or more of SEQ ID NOs: 379, 381, 383, 385, or fragments thereof.

[0330] In some instances, components of the base editing system are associated with one another through the interaction of leucine zipper domains (e.g., SEQ ID NOs: 387 and 388). In some cases, components of the base editing system are associated with one another through polypeptide domains (e.g., FokI domains) that associate to form protein complexes containing about, at least about, or no more than about 1, 2 (i.e., dimerize), 3, 4, 5, 6, 7, 8, 9, 10 polypeptide domain units, optionally the polypeptide domains may include alterations that reduce or eliminate an activity thereof.

[0331] In some instances, components of the base editing system are associated with one another through the interaction of multimeric antibodies or fragments thereof (e.g., IgG, IgD, IgA, IgM, IgE, a heavy chain domain 2 (CH2) of IgM (MHD2) or IgE (EHD2), an immunoglobulin Fc region, a heavy chain domain 3 (CH3) of IgG or IgA, a heavy chain domain 4 (CH4) of IgM or IgE, an Fab, and an Fab2). In some instances, the antibodies are dimeric, trimeric, or tetrameric. In embodiments, the dimeric antibodies bind a polypeptide or polynucleotide component of the base editing system.

[0332] In some cases, components of the base editing system are associated with one another through the interaction of a polynucleotide-binding protein domain(s) with a polynucleotide(s). In some instances, components of the base editing system are associated with one another through the interaction of one or more polynucleotide-binding protein domains with polynucleotides that are self-complementary and/or complementary to one another so that complementary binding of the polynucleotides to one another brings into association their respective bound polynucleotide-binding protein domain(s). In some instances, components of the base editing system are associated with one another through the interaction of a polypeptide domain(s) with a small molecule(s) (e.g., chemical inducers of dimerization (CIDs), also known as “dimerizers”). Non-limiting examples of CIDs include those disclosed in Amara, et al., “A versatile synthetic dimerizer for the regulation of protein-protein interactions,” PNAS, 94:10618-10623 (1997); and Voß, et al. “Chemically induced dimerization: reversible and spatiotemporal control of protein function in cells,” Current Opinion in Chemical Biology, 28:194-201 (2015), the disclosures of each of which are incorporated herein by reference in their entireties for all purposes. In some embodiments, the base editor inhibits base excision repair (BER) of the edited strand. In some embodiments, the base editor protects or binds the non-edited strand. In some embodiments, the base editor comprises UGI activity or USP activity. In some embodiments, the base editor comprises a catalytically inactive inosine-specific nuclease.

[0333] The base editors of the present disclosure can comprise any domain, feature or amino acid sequence which facilitates the editing of a target polynucleotide sequence. For example, in some embodiments, the base editor comprises a nuclear localization sequence (NLS). In some embodiments, an NLS of the base editor is localized between a deaminase domain and a polynucleotide programmable nucleotide binding domain. In some embodiments, an NLS of the base editor is localized C-terminal to a polynucleotide programmable nucleotide binding domain.

[0334] Protein domains included in the fusion protein can be a heterologous functional domain. Non-limiting examples of protein domains which can be included in the fusion protein include a deaminase domain (e.g., cytidine deaminase and/or adenosine deaminase), a uracil glycosylase inhibitor (UGI) domain, epitope tags, and reporter gene sequences. In some embodiments, the adenosine base editor (ABE) can deaminate adenine in DNA. In some embodiments, ABE is generated by replacing APOBEC1 component of BE3 with natural or engineered E. coli TadA, human ADAR2, mouse ADA, or human ADAT2. In some embodiments, ABE comprises an evolved TadA variant. In some embodiments, the base editor is ABE8.1, which comprises or consists essentially of the following sequence or a fragment thereof having adenosine deaminase activity: SEQ ID NO: 331. Other ABE8 sequences are provided in the attached sequence listing (SEQ ID NOs: 332-354).

[0335] In some embodiments, the base editor includes an adenosine deaminase variant comprising an amino acid sequence, which contains alterations relative to an ABE 7*10 reference sequence, as described herein. The term “monomer” as used in Table 6 refers to a monomeric form of TadA*7.10 comprising the alterations described. The term “heterodimer” as used in Table 6 refers to the specified wild-type E. coli TadA adenosine deaminase fused to a TadA*7.10 comprising the alterations as described.

TABLE 6
Adenosine Deaminase Base Editor Variants

| | Adenosine | |
|---|---|---|
| ABE | Deaminase | Adenosine Deaminase Description |
| ABE-605m | MSP605 | monomer_TadA*7.10 + V82G + Y147T + Q154S |
| ABE-680m | MSP680 | monomer_TadA*7.10 + I76Y + V82G + Y147T + Q154S |
| ABE-823m | MSP823 | monomer_TadA*7.10 + L36H + V82G + Y147T + Q154S + |
| | | N157K |
| ABE-824m | MSP824 | monomer_TadA*7.10 + V82G + Y147D + F149Y + Q154S + |
| | | D167N |
| ABE-825m | MSP825 | monomer_TadA*7.10 + L36H + V82G + Y147D + F149Y + |
| | | Q154S + N157K + D167N |
| ABE-827m | MSP827 | monomer_TadA*7.10 + L36H + 176Y + V82G + Y147T + |
| | | Q154S + N157K |
| ABE-828m | MSP828 | monomer_TadA*7.10 + I76Y + V82G + Y147D + F149Y + |
| | | Q154S + D167N |
| ABE-829m | MSP829 | monomer_TadA*7.10 + L36H + I76Y + V82G + Y147D + |
| | | F149Y + Q154S + N157K + D167N |
| ABE-605d | MSP605 | heterodimer_(WT) + (TadA*7.10 + V82G + Y147T + Q154S) |
| ABE-680d | MSP680 | heterodimer_(WT) + (TadA*7.10 + I76Y + V82G + Y147T + |
| | | Q154S) |
| ABE-823d | MSP823 | heterodimer_(WT) + (TadA*7.10 + L36H + V82G + Y147T + |
| | | Q154S + N157K) |
| ABE-824d | MSP824 | heterodimer_(WT) + (TadA*7.10 + V82G + Y147D + F149Y + |
| | | Q154S + D167N) |
| ABE-825d | MSP825 | heterodimer_(WT) + (TadA*7.10 + L36H + V82G + Y147D + |
| | | F149Y + Q154S + N157K + D167N) |
| ABE-827d | MSP827 | heterodimer_(WT) + (TadA*7.10 + L36H + I76Y + V82G + |
| | | Y147T + Q154S + N157K) |
| ABE-828d | MSP828 | heterodimer_(WT) + (TadA*7.10 + I76Y + V82G + Y147D + |
| | | F149Y + Q154S + D167N) |
| ABE-829d | MSP829 | heterodimer_(WT) + (TadA*7.10 + L36H + I76Y + V82G + |
| | | Y147D + F149Y + Q154S + N157K + D167N) |

[0336] In some embodiments, the base editor comprises a domain comprising all or a portion (e.g., a functional portion) of a uracil glycosylase inhibitor (UGI) or a uracil stabilizing protein (USP) domain.

### Linkers

[0337] In certain embodiments, linkers may be used to link any of the peptides or peptide domains of the disclosure. The linker may be as simple as a covalent bond, or it may be a polymeric linker many atoms in length. In certain embodiments, the linker is a polypeptide or based on amino acids. In other embodiments, the linker is not peptide-like. In certain embodiments, the linker is a covalent bond (e.g., a carbon-carbon bond, disulfide bond, carbon-heteroatom bond, etc.).

[0338] In some embodiments, any of the fusion proteins provided herein, comprise a cytidine or adenosine deaminase and a Cas9 domain that are fused to each other via a linker. Various linker lengths and flexibilities between the cytidine or adenosine deaminase and the Cas9 domain can be employed (e.g., ranging from very flexible linkers of the form (GGGS) n (SEQ ID NO: 246), (GGGGS)ₙ (SEQ ID NO: 247), and (G)ₙ to more rigid linkers of the form (EAAAK)ₙ (SEQ ID NO: 248), (SGGS)ₙ (SEQ ID NO: 355), SGSETPGTSESATPES (SEQ ID NO: 249) (see, e.g., Guilinger J P, et al. Fusion of catalytically inactive Cas9 to FokI nuclease improves the specificity of genome modification. Nat. Biotechnol. 2014; 32(6): 577-82; the entire contents are incorporated herein by reference) and (XP)n) in order to achieve the optimal length for activity for the cytidine or adenosine deaminase nucleobase editor. In some embodiments, n is 1, 2, 3, 4, 5, 6, 7, 8, 9, 10, 11, 12, 13, 14, or 15. In some embodiments, the linker comprises a (GGS)n motif, wherein n is 1, 3, or 7. In some embodiments, cytidine deaminase or adenosine deaminase and the Cas9 domain of any of the fusion proteins provided herein are fused via a linker comprising the amino acid sequence SGSETPGTSESATPES (SEQ ID NO: 249), which can also be referred to as the XTEN linker.

[0339] In some embodiments, the domains of the base editor are fused via a linker that comprises the amino acid sequence of:

```
  (SEQ ID NO: 356)
SGGSSGSETPGTSESATPESSGGS,
  (SEQ ID NO: 357)
SGGSSGGSSGSETPGTSESATPESSGGSSGGS,
or
(SEQ ID NO: 358)
GGSGGSPGSPAGSPTSTEEGTSESATPESGPGTSTEPSEGSAPGSPAGSP
TSTEEGTSTEPSEGSAPGTSTEPSEGSAPGTSESATPESGPGSEPATSGG
SGGS.
```

[0340] In some embodiments, domains of the base editor are fused via a linker comprising the amino acid sequence SGSETPGTSESATPES (SEQ ID NO: 249), which may also be referred to as the XTEN linker. In some embodiments, a linker comprises the amino acid sequence SGGS (SEQ ID NO: 355). In some embodiments, the linker is 24 amino acids in length. In some embodiments, the linker comprises the amino acid sequence SGGSSGGSSGSETPGTSESATPES (SEQ ID NO: 359). In some embodiments, the linker is 40 amino acids in length. In some embodiments, the linker comprises the amino acid sequence: SGGSSGGSSGSETPGTSESATPESSGGSSGGSSGGSSGGS (SEQ ID NO: 360). In some embodiments, the linker is 64 amino acids in length. In some embodiments, the linker comprises the amino acid sequence: SGGSSGGSSGSETPGTSESATPESSGGSSGGSSGGSSGGSSGSETPGTSESATPESSGGSSG GS (SEQ ID NO: 361). In some embodiments, the linker is 92 amino acids in length. In some embodiments, the linker comprises the amino acid sequence:

(SEQ ID NO: 362)
PGSPAGSPTSTEEGTSESATPESGPGTSTEPSEGSAPGSPAGSPTSTEEG
TSTEPSEGSAPGTSTEPSEGSAPGTSESATPESGPGSEPATS.

In some embodiments, a linker comprises a plurality of proline residues and is 5-21, 5-14, 5-9, 5-7 amino acids in length, e.g., PAPAP (SEQ ID NO: 363), PAPAPA (SEQ ID NO: 364), PAPAPAP (SEQ ID NO: 365), PAPAPAPA (SEQ ID NO: 366), P(AP)4 (SEQ ID NO: 367), P(AP)7 (SEQ ID NO: 368), P(AP)10 (SEQ ID NO: 369) (see, e.g., Tan J, Zhang F, Karcher D, Bock R. Engineering of high-precision base editors for site-specific single nucleotide replacement. Nat Commun. 2019 Jan. 25; 10(1):439; the entire contents are incorporated herein by reference). Such proline-rich linkers are also termed “rigid” linkers.

[0341] Some aspects of the disclosure provide novel polypeptides. In some embodiments the polypeptides, provided herein, are used as linkers and may be used to link any of the peptides or peptide domains of the disclosure. In some embodiments the linkers are used to link a TadA domain (e.g., a TadA*7.10) to a Cas9 domain (e.g., a SpCas9-MQKFRAER nickase). In some embodiments, such linkers are rationally designed to bring a deaminase domain (e.g., a TadA domain) in proximity to a target adenine (e.g., at position A7) in a target site. In some embodiments, the polypeptide comprises any one of the amino acid sequences: STDTTKDTSPKPQDKI (SEQ ID NO: 497), STDANAHSDISTGDKI (SEQ ID NO: 498), STDEDKRSDLGKQDKI (SEQ ID NO: 499), STDEKDQQPNSTSDKI (SEQ ID NO: 500), STDQKGQKIPSSNDKI (SEQ ID NO: 501), STDDRSQKQDQQDDKI (SEQ ID NO: 502), STDSKSVPLSSDGDKI (SEQ ID NO: 503), STDRQPRKDNSSGDKI (SEQ ID NO: 504), STDKEGDQPPPPKDKI (SEQ ID NO: 505), STDDVEYYSRPPDDKI (SEQ ID NO: 506), STDDPRKREIPPPDKI (SEQ ID NO: 507), STDERQHSTPTTDDKI (SEQ ID NO: 508), STDSSKQPENPPQDKI (SEQ ID NO: 509), STDPGGAPETNSGDKI (SEQ ID NO: 510), STDNISLSYDQQDDKI (SEQ ID NO: 511), STDSKSQQFVTYEDKI (SEQ ID NO: 512), and STDLTESRPPQESDKI (SEQ ID NO: 513). In some embodiments, the polypeptide comprises any one of the amino acid sequences: EGSSSKEEEEPG (SEQ ID NO: 514), NSISSSNGQK (SEQ ID NO: 515), GEEGEGSGGGEK (SEQ ID NO: 516), EGEGGKESGSSE (SEQ ID NO: 517), GGGGSSKSPGSE (SEQ ID NO: 518), PIGSDQDD (SEQ ID NO: 519), TEKGQVPHGS (SEQ ID NO: 520), ESGEGGGGSEKK (SEQ ID NO: 521), EEGKPKEGEGSG (SEQ ID NO: 522), ASREPKDSS (SEQ ID NO: 523), KQGSEHDE (SEQ ID NO: 524), SESKSEKGSSEK (SEQ ID NO: 525), QYDSGERSDQ (SEQ ID NO: 526), PGANEEIPGQ (SEQ ID NO: 527), NSPTDEK (SEQ ID NO: 528), EGANEEIPGQ (SEQ ID NO: 529), EGEKEKKKSGES (SEQ ID NO: 530), PGRHEEVPGQ (SEQ ID NO: 531), SKHQTEQDDS (SEQ ID NO: 532), and ESEDDSSGRK (SEQ ID NO: 533). In some embodiments, the polypeptide comprises any one of the amino acid sequences: KESEKKESESKS (SEQ ID NO: 534), KGEGKSSIKD (SEQ ID NO: 535), DRSQKQDQQD (SEQ ID NO: 536), GPSSTSSS (SEQ ID NO: 537), GSSGEKEEGEPS (SEQ ID NO: 538), GEPKSKKSGSGS (SEQ ID NO: 539), SSGEGGKSESGP (SEQ ID NO: 540), SPQPTSSD (SEQ ID NO: 541), EGGSEEEEESGS (SEQ ID NO: 542), KGPKPKKEESEK (SEQ ID NO: 439), SKSQQFVTYE (SEQ ID NO: 544), TGNSKYQTGK (SEQ ID NO: 545), PQPIPHTNPT (SEQ ID NO: 546), ANAHSDISTG (SEQ ID NO: 547), KSQQTEDQSK (SEQ ID NO: 548), QSQDQKQKEH (SEQ ID NO: 549), NQQRPSSD (SEQ ID NO: 550), TTKDTSPKPQ (SEQ ID NO: 551), EGKDNQQTGE (SEQ ID NO: 552), and EPQPDSSE (SEQ ID NO: 553). It should be appreciated that the disclosure provides variants of the polypeptides (e.g., linkers) provided herein. In some embodiments, the polypeptide variant (e.g., linker) comprises at least 1, 2, 3, 4, or 5 amino acid changes from a reference sequence. In some embodiments the polypeptide variant (e.g., linker) has 1, 2, 3, 4, or 5 amino acid residues removed from the N-terminus of a reference sequence. In some embodiments the polypeptide variant (e.g., linker) has 1, 2, 3, 4, or 5 amino acid residues removed from the C-terminus of a reference sequence.

[0342] In some embodiments, the disclosure provides a polypeptide comprising the amino acid sequence EGGSEEEEESGS (SEQ ID NO: 542). In some embodiments the amino acid sequence EGGSEEEEESGS (SEQ ID NO: 542) is used to link a TadA domain (e.g., TadA*7.10) with a Cas9 domain (e.g., a SpCas9-MQKFRAER nickase), for example, in a base editor protein or system. In some embodiments, the amino acid linker EGGSEEEEESGS (SEQ ID NO: 542) is used to link a TadA*7.10 to a SpCas9-MQKFRAER nickase, for example, as in ABE Variant C and ABE Variant D.

[0343] In some embodiments, the disclosure provides a polypeptide comprising the amino acid sequence KGPKPKKEESEK (SEQ ID NO: 439). In some embodiments the amino acid sequence KGPKPKKEESEK (SEQ ID NO: 439) is used to link a TadA domain (e.g., TadA*7.10) with a Cas9 domain (e.g., a SpCas9-MQKFRAER nickase), for example, in a base editor protein or system. In some embodiments, the amino acid linker KGPKPKKEESEK (SEQ ID NO: 439) is used to link a TadA*7.10 to a SpCas9-MQKFRAER nickase, for example, as in ABE Variant E, ABE Variant I, and ABE Variant K.

Nucleic Acid Programmable DNA Binding Proteins with Guide RNAs

[0344] Provided herein are compositions and methods for base editing in cells. Further provided herein are compositions comprising a guide polynucleotide sequence, e.g., a guide RNA sequence, or a combination of 2, 3, 4, 5, 6, 7, 8, 9, 10, 11, 12, 13, 14, 15, 16, 17, 18, 19, 20, or more guide RNAs as provided herein. In some embodiments, a composition for base editing as provided herein further comprises a polynucleotide that encodes a base editor, e.g., a C-base editor or an A-base editor. For example, a composition for base editing may comprise a mRNA sequence encoding an ABE, and a combination of one or more guide RNAs as provided. A composition for base editing may comprise a base editor polypeptide and a combination of one or more of any guide RNAs provided herein. Such a composition may be used to effect base editing in a cell through different delivery approaches, for example, electroporation, nucleofection, viral transduction or transfection. In some embodiments, the composition for base editing comprises an mRNA sequence that encodes a base editor and a combination of one or more guide RNA sequences provided herein for electroporation.

[0345] Some aspects of this disclosure provide systems comprising any of the fusion proteins or complexes provided herein, and a guide RNA bound to a nucleic acid programmable DNA binding protein (napDNAbp) domain (e.g., a Cas9 (e.g., a dCas9, a nuclease active Cas9, or a Cas9 nickase) or Cas12) of the fusion protein or complex. These complexes are also termed ribonucleoproteins (RNPs). In some embodiments, the guide nucleic acid (e.g., guide RNA) is from 15-100 nucleotides long and comprises a sequence of at least 10 contiguous nucleotides that is complementary to a target sequence. In some embodiments, the target sequence is a DNA sequence. In some embodiments, the target sequence is an RNA sequence. In some embodiments, the target sequence is a sequence in the genome of a bacteria, yeast, fungi, insect, plant, or animal. In some embodiments, the target sequence is a sequence in the genome of a human. In some embodiments, the 3′ end of the target sequence is immediately adjacent to a canonical PAM sequence (NGG). In some embodiments, the 3′ end of the target sequence is immediately adjacent to a non-canonical PAM sequence (e.g., a sequence listed in Table 3 or 5′-NAA-3′). In some embodiments, the guide nucleic acid (e.g., guide RNA) is complementary to a sequence in a gene of interest (e.g., a gene associated with a disease or disorder).

[0346] Some aspects of this disclosure provide methods of using the fusion proteins, or complexes provided herein. For example, some aspects of this disclosure provide methods comprising contacting a DNA molecule with any of the fusion proteins or complexes provided herein, and with at least one guide RNA, wherein the guide RNA is about 15-100 nucleotides long and comprises a sequence of at least 10 contiguous nucleotides that is complementary to a target sequence.

[0347] The domains of the base editor disclosed herein can be arranged in any order.

[0348] A defined target region can be a deamination window. A deamination window can be the defined region in which a base editor acts upon and deaminates a target nucleotide. In some embodiments, the deamination window is within a 2, 3, 4, 5, 6, 7, 8, 9, or 10 base regions. In some embodiments, the deamination window is 5, 6, 7, 8, 9, 10, 11, 12, 13, 14, 15, 16, 17, 18, 19, 20, 21, 22, 23, 24, or 25 bases upstream of the PAM.

[0349] The base editors of the present disclosure can comprise any domain, feature or amino acid sequence which facilitates the editing of a target polynucleotide sequence.

### Methods of Using Fusion Proteins or Complexes Comprising an Adenosine Deaminase and a Cas9 Domain

[0350] Some aspects of this disclosure provide methods of using the fusion proteins, or complexes provided herein. For example, some aspects of this disclosure provide methods comprising contacting a DNA molecule with any of the fusion proteins or complexes provided herein, and with at least one guide RNA described herein.

[0351] In some embodiments, a fusion protein or complex of the disclosure is used for editing a target gene of interest. In particular, an adenosine deaminase nucleobase editor described herein is capable of making multiple mutations within a target sequence. These mutations may affect the function of the target. For example, when an adenosine deaminase nucleobase editor is used to target a regulatory region the function of the regulatory region is altered and the expression of the downstream protein is reduced or eliminated.

### Base Editor Efficiency

[0352] In some embodiments, the purpose of the methods provided herein is to alter a gene and/or gene product via gene editing. The nucleobase editing proteins provided herein can be used for gene editing-based human therapeutics in vitro or in vivo. It will be understood by the skilled artisan that the nucleobase editing proteins provided herein, e.g., the fusion proteins or complexes comprising a polynucleotide programmable nucleotide binding domain (e.g., Cas9) and a nucleobase editing domain (e.g., an adenosine deaminase domain) can be used to edit a nucleotide from A to G.

[0353] Advantageously, base editing systems as provided herein provide genome editing without generating double-strand DNA breaks, without requiring a donor DNA template, and without inducing an excess of stochastic insertions and deletions as CRISPR may do. In some embodiments, the present disclosure provides base editors that efficiently generate an intended mutation, such as a STOP codon, in a nucleic acid (e.g., a nucleic acid within a genome of a subject) without generating a significant number of unintended mutations, such as unintended point mutations.

[0354] The base editors of the disclosure advantageously modify a specific nucleotide base encoding a protein without generating a significant proportion of indels (i.e., insertions or deletions). Such indels can lead to frame shift mutations within a coding region of a gene.

[0355] In some embodiments, the base editors provided herein are capable of generating a ratio of intended mutations to indels (i.e., intended point mutations:unintended point mutations) that is greater than 1:1. In some embodiments, the base editors provided herein are capable of generating a ratio of intended mutations to indels that is at least 1.5:1, at least 2:1, at least 2.5:1, at least 3:1, at least 3.5:1, at least 4:1, at least 4.5:1, at least 5:1, at least 5.5:1, at least 6:1, at least 6.5:1, at least 7:1, at least 7.5:1, at least 8:1, at least 10:1, at least 12:1, at least 15:1, at least 20:1, at least 25:1, at least 30:1, at least 40:1, at least 50:1, at least 100:1, at least 200:1, at least 300:1, at least 400:1, at least 500:1, at least 600:1, at least 700:1, at least 800:1, at least 900:1, or at least 1000:1, or more. The number of intended mutations and indels may be determined using any suitable method.

[0356] In some embodiments, the base editors provided herein can limit formation of indels in a region of a nucleic acid. In some embodiments, the region is at a nucleotide targeted by a base editor or a region within 2, 3, 4, 5, 6, 7, 8, 9, or 10 nucleotides of a nucleotide targeted by a base editor. In some embodiments, any of the base editors provided herein can limit the formation of indels at a region of a nucleic acid to less than 1%, less than 1.5%, less than 2%, less than 2.5%, less than 3%, less than 3.5%, less than 4%, less than 4.5%, less than 5%, less than 6%, less than 7%, less than 8%, less than 9%, less than 10%, less than 12%, less than 15%, or less than 20%.

[0357] Base editing is often referred to as a “modification”, such as, a genetic modification, a gene modification and modification of the nucleic acid sequence and is clearly understandable based on the context that the modification is a base editing modification. A base editing modification is therefore a modification at the nucleotide base level, for example as a result of the deaminase activity discussed throughout the disclosure, which then results in a change in the gene sequence and may affect the gene product.

[0358] In some embodiments, the modification, e.g., single base edit results in about or at least about a 10%, 15%, 20%, 25%, 30%, 35%, 40%, 45%, 50%, 55%, 60%, 65%, 70%, 75%, 80%, 85%, 90%, 95%, 99%, or 100% reduction, or reduction to an undetectable level, of the gene targeted expression.

[0359] The disclosure provides adenosine deaminase variants (e.g., ABE8 variants) that have increased efficiency and specificity. In particular, the adenosine deaminase variants described herein are more likely to edit a desired base within a polynucleotide and are less likely to edit bases that are not intended to be altered (e.g., “bystanders”).

[0360] In some embodiments, any of the base editing system comprising one of the ABE8 base editor variants described herein has reduced bystander editing or mutations by at least 1%, 2%, 3%, 4%, 5%, 10%, 15%, 20%, 25%, 30%, 35%, 40%, 45%, 50%, 55%, 60%, 65%, 70%, 75%, 80%, 85%, 90%, 95%, or 99% compared to a base editor system comprising an ABE7 base editor, e.g., ABE7.10.

[0361] In some embodiments, any of the ABE8 base editor variants described herein has higher base editing efficiency compared to the ABE7 base editors. In some embodiments, any of the ABE8 base editor variants described herein have at least 1%, 2%, 3%, 4%, 5%, 10%, 15%, 20%, 25%, 30%, 35%, 40%, 45%, 50%, 55%, 60%, 65%, 70%, 75%, 80%, 85%, 90%, 95%, 99%, 100%, 105%, 110%, 115%, 120%, 125%, 130%, 135%, 140%, 145%, 150%, 155%, 160%, 165%, 170%, 175%, 180%, 185%, 190%, 195%, 200%, 210%, 220%, 230%, 240%, 250%, 260%, 270%, 280%, 290%, 300%, 310%, 320%, 330%, 340%, 350%, 360%, 370%, 380%, 390%, 400%, 450%, or 500% higher base editing efficiency compared to an ABE7 base editor, e.g., ABE7.10.

[0362] The ABE8 base editor variants described herein may be delivered to a host cell via a plasmid, a vector, a LNP complex, or an mRNA. In some embodiments, any of the ABE8 base editor variants described herein is delivered to a host cell as an mRNA.

[0363] In some embodiments, the method described herein, for example, the base editing methods has minimum to no off-target effects. In some embodiments, the method described herein, for example, the base editing methods, has minimal to no chromosomal translocations.

[0364] In some embodiments, the base editing method described herein results in about 91%, 92%, 93%, 94%, 95%, 96%, 97%, 98%, 99% or 100% of a cell population that have been successfully edited.

[0365] In some embodiments, the percent of viable cells in a cell population following a base editing intervention is greater than at least 60%, 70%, 80%, or 90% of the starting cell population at the time of the base editing event. In some embodiments, the percent of viable cells in a cell population following editing is about 70%. In some embodiments, the percent of viable cells in a cell population following editing is about 75%. In some embodiments, the percent of viable cells in a cell population following editing is about 80%. In some embodiments, the percent of viable cells in a cell population as described above is about 85%. In some embodiments, the percent of viable cells in a cell population as described above is about 90%, or about 91%, 92%, 93%, 94% 95%, 96%, 97%, 98%, 99%, or 100% of the cells in the population at the time of the base editing event.

[0366] In embodiments, the cell population is a population of cells contacted with a base editor, complex, or base editor system of the present disclosure.

[0367] The number of intended mutations and indels can be determined using any suitable method, for example, as described in International PCT Application Nos. PCT/US2017/045381 (WO2018/027078) and PCT/US2016/058344 (WO2017/070632); Komor, A. C., et al., “Programmable editing of a target base in genomic DNA without double-stranded DNA cleavage” Nature 533, 420-424 (2016); Gaudelli, N. M., et al., “Programmable base editing of A•T to G•C in genomic DNA without DNA cleavage” Nature 551, 464-471 (2017); and Komor, A. C., et al., “Improved base excision repair inhibition and bacteriophage Mu Gam protein yields C:G-to-T:A base editors with higher efficiency and product purity” Science Advances 3:eaao4774 (2017); the entire contents of which are hereby incorporated by reference.

[0368] In some embodiments, to calculate indel frequencies, sequencing reads are scanned for exact matches to two 10-bp sequences that flank both sides of a window in which indels can occur. If no exact matches are located, the read is excluded from analysis. If the length of this indel window exactly matches the reference sequence the read is classified as not containing an indel. If the indel window is two or more bases longer or shorter than the reference sequence, then the sequencing read is classified as an insertion or deletion, respectively. In some embodiments, the base editors provided herein can limit formation of indels in a region of a nucleic acid. In some embodiments, the region is at a nucleotide targeted by a base editor or a region within 2, 3, 4, 5, 6, 7, 8, 9, or 10 nucleotides of a nucleotide targeted by a base editor.

### Multiplex Editing

[0369] In some embodiments, the base editor system provided herein is capable of multiplex editing of a plurality of nucleobase pairs in one or more genes or polynucleotide sequences. In some embodiments, the plurality of nucleobase pairs is located in the same gene or in one or more genes, wherein at least one gene is located in a different locus. In some embodiments, the multiplex editing comprises one or more guide polynucleotides. In some embodiments, the multiplex editing comprises one or more base editor systems. In some embodiments, the multiplex editing comprises one or more base editor systems with a single guide polynucleotide or a plurality of guide polynucleotides. In some embodiments, the multiplex editing comprises one or more guide polynucleotides with a single base editor system. It should be appreciated that the characteristics of the multiplex editing using any of the base editors as described herein can be applied to any combination of methods using any base editor provided herein. It should also be appreciated that the multiplex editing using any of the base editors as described herein can comprise a sequential editing of a plurality of nucleobase pairs.

[0370] In some embodiments, the base editor system capable of multiplex editing of a plurality of nucleobase pairs in one or more genes comprises one of ABE7, ABE8, and/or ABE9 base editors.

### Expression of Fusion Proteins or Complexes in a Host Cell

[0371] Fusion proteins or complexes of the disclosure comprising a deaminase may be expressed in virtually any host cell of interest, including but not limited to bacteria, yeast, fungi, insects, plants, and animal cells using routine methods known to the skilled artisan. For example, a DNA encoding an adenosine deaminase of the disclosure can be cloned by designing suitable primers for the upstream and downstream of CDS based on the cDNA sequence. The cloned DNA may be directly, or after digestion with a restriction enzyme when desired, or after addition of a suitable linker and/or a nuclear localization signal, ligated with a DNA encoding one or more additional components of a base editing system. The base editing system is translated in a host cell to form a complex.

[0372] A polynucleotide encoding a polypeptide described herein can be obtained by chemically synthesizing the polynucleotide, or by connecting synthesized partly overlapping oligo short chains by utilizing the PCR method and the Gibson Assembly method to construct a polynucleotide (e.g., DNA) encoding the full length thereof. The advantage of constructing a full-length polynucleotide by chemical synthesis or a combination of PCR method or Gibson Assembly method is that the codons to be used can be selected in according to the host into which the polynucleotide is to be introduced. In the expression from a heterologous DNA molecule, the protein expression level is expected to increase by converting the DNA sequence thereof to a codon highly frequently used in the host organism. Codon use data for a host cell (e.g., codon use data available at kazusa.or.jp/codon/index.html) can be used to guide codon optimization for a polynucleotide sequence encoding a polypeptide. Codons having low use frequency in the host may be converted to a codon coding the same amino acid and having high use frequency.

[0373] An expression vector containing a polynucleotide encoding a nucleic acid sequence-recognizing module and/or a nucleic acid base converting enzyme can be produced, for example, by linking the DNA to the downstream of a promoter in a suitable expression vector.

[0374] As the expression vector, Escherichia coli-derived plasmids (e.g., pBR322, pBR325, pUC12, pUC13); Bacillus subtilis-derived plasmids (e.g., pUB110, pTP5, pC194); yeast-derived plasmids (e.g., pSH19, pSH15); insect cell expression plasmids (e.g., pFast-Bac); animal cell expression plasmids (e.g., pA1-11, pXT1, pRc/CMV, pRc/RSV, pcDNAI/Neo); bacteriophages such as .lambda phage and the like; insect virus vectors such as baculovirus and the like (e.g., BmNPV, AcNPV); animal virus vectors such as retrovirus, vaccinia virus, adenovirus and the like, and the like are used.

[0375] Regarding the promoter to be used, any promoter appropriate for a host to be used for gene expression can be used. In a conventional method using double-stranded breaks, since the survival rate of the host cell sometimes decreases markedly due to the toxicity, it is desirable to increase the number of cells by the start of the induction by using an inductive promoter. However, since sufficient cell proliferation can also be afforded by expressing the nucleic acid-modifying enzyme complex of the present disclosure, a constitutive promoter can be used without limitation.

[0376] For example, when the host is an animal cell, an SR.alpha. promoter, SV40 promoter, LTR promoter, cytomegalovirus (CMV) promoter, Rous sarcoma virus (RSV) promoter, Moloney mouse leukemia virus (MoMuLV), LTR, herpes simplex virus thymidine kinase (HSV-TK) promoter, and the like can be used. Of these, CMV promoter, SR.alpha. promoter and the like may be used.

[0377] When the host is Escherichia coli, a trp promoter, lac promoter, recA promoter, .lamda.P.sub.L promoter, lpp promoter, T7 promoter, and the like can be used.

[0378] When the host is in the genus Bacillus, the SPO1 promoter, SPO2 promoter, penP promoter, and the like can be used.

[0379] When the host is a yeast, the Gall/10 promoter, PHO5 promoter, PGK promoter, GAP promoter, ADH promoter, and the like can be used.

[0380] When the host is an insect cell, the polyhedrin promoter, P10 promoter, and the like can be used.

[0381] When the host is a plant cell, the CaMV35S promoter, CaMV19S promoter, NOS promoter, and the like can be used.

[0382] Expression vectors for use in the present disclosure, besides those mentioned above, can comprise an enhancer, a splicing signal, a terminator, a polyA addition signal, a selection marker such as drug resistance gene, an auxotrophic complementary gene and the like, a replication origin, and the like can be used.

[0383] An RNA encoding a protein domain described herein can be prepared by, for example, in vitro transcription of a nucleic acid sequence encoding any of the fusion proteins or complexes disclosed herein.

[0384] A fusion protein or complex of the disclosure can be intracellularly expressed by introducing into the cell an expression vector comprising a nucleic acid sequence encoding the fusion protein or complex.

[0385] Host cells of interest, include but are not limited to bacteria, yeast, fungi, insects, plants, and animal cells. For example, a host cell may comprise bacteria from the genus Escherichia, such as Escherichia coli K12.cndot.DH1 [Proc. Natl. Acad. Sci. USA, 60, 160 (1968)], Escherichia coli JM103 [Nucleic Acids Research, 9, 309 (1981)], Escherichia coli JA221 [Journal of Molecular Biology, 120, 517 (1978)], Escherichia coli HB101 [Journal of Molecular Biology, 41, 459 (1969)], Escherichia coli C600 [Genetics, 39, 440 (1954)] and the like.

[0386] A host cell may comprise bacteria from the genus Bacillus, for example Bacillus subtilis M1114 [Gene, 24, 255 (1983)], Bacillus subtilis 207-21 [Journal of Biochemistry, 95, 87 (1984)] and the like.

[0387] A host cell may be a yeast cell. Examples of yeast cells include Saccharomyces cerevisiae AH22, AH22R.sup.-, NA87-11A, DKD-5D, 20B-12, Schizosaccharomyces pombe NCYC1913, NCYC2036, Pichia pastoris KM71 and the like.

[0388] When the viral delivery methods utilize the virus AcNPV, cells from a cabbage armyworm larva-derived established line (Spodoptera frugiperda cell; Sf cell), MGT cells derived from the mid-intestine of Trichoplusia ni, High Five™ cells derived from an ovary of Trichoplusia ni, Mamestra brassicae-derived cells, Estigmena acrea-derived cells and the like can be used. When the virus is BmNPV, cells of Bombyx mori-derived established line (Bombyx mori N cell; BmN cell) and the like are used. As the Sf cell, for example, Sf9 cell (ATCC CRL1711), Sf21 cell [all above, In Vivo, 13, 213-217 (1977)] and the like are used.

[0389] An insect can be any insect, for example, larva of Bombyx mori, Drosophila, cricket, and the like [Nature, 315, 592 (1985)].

[0390] Animal cells contemplated in the present disclosure include, but are not limited to, cell lines such as monkey COS-7 cells, monkey Vero cells, Chinese hamster ovary (CHO) cells, dhfr gene-deficient CHO cells, mouse L cells, mouse AtT-20 cells, mouse myeloma cells, rat GH3 cells, human FL cells and the like, pluripotent stem cells such as iPS cells, ES cells derived humans and other mammals, and primary cultured cells prepared from various tissues. Furthermore, zebrafish embryo, Xenopus oocyte, and the like can also be used.

[0391] Plant cells are also contemplated in the present disclosure. Plant cells include, but are not limited to, suspended cultured cells, callus, protoplast, leaf segment, root segment and the like prepared from various plants (e.g., grain such as rice, wheat, com, and the like; product crops such as tomato, cucumber, eggplant and the like; garden plants such as carnations, Eustoma russellianum, and the like; and other plants such as tobacco, Arabidopsis thaliana and the like) are used.

[0392] All the above-mentioned host cells may be haploid (monoploid), or polyploid (e.g., diploid, triploid, tetraploid, etc.). Using conventional methods, mutations, in principle, introduced into only one homologous chromosome produce a heterogenous cell. Therefore, the desired phenotype is not expressed unless the mutation is dominant. For recessive mutations, acquiring a homozygous cell can be inconvenient due to labor and time requirements. In contrast, according to the present disclosure, since a mutation can be introduced into any allele on the homologous chromosome in the genome, the desired phenotype can be expressed in a single generation even in the case of recessive mutation, thereby solving the problem associated with conventional mutagenesis methods.

[0393] An expression vector can be introduced by a known method (e.g., the lysozyme method, the competent method, the PEG method, the CaCl₂) coprecipitation method, electroporation, microinjection, particle gun method, lipofection, Agrobacterium-mediated delivery, etc.) according to the kind of the host.

[0394] Escherichia coli can be transformed according to the methods described in, for example, Proc. Natl. Acad. Sci. USA, 69, 2110 (1972), Gene, 17, 107 (1982).

[0395] The genus Bacillus can be introduced into a vector according to the methods described in, for example, Molecular & General Genetics, 168, 111 (1979).

[0396] A yeast can be introduced into a vector according to the methods described in, for example, Methods in Enzymology, 194, 182-187 (1991), Proc. Natl. Acad. Sci. USA, 75, 1929 (1978).

[0397] An insect cell and an insect can be introduced into a vector according to the methods described in, for example, Bio/Technology, 6, 47-55 (1988).

[0398] A vector can be introduced into an animal cell according to the methods described in, for example, Cell Engineering additional volume 8, New Cell Engineering Experiment Protocol, 263-267 (1995) (published by Shujunsha), and Virology, 52, 456 (1973).

[0399] A cell comprising a vector can be cultured according to a known method according to the kind of the host. For example, when Escherichia coli or genus Bacillus is cultured, a liquid medium may be used as a medium to be used for the culture. The medium may contain a carbon source, nitrogen source, inorganic substance and the like necessary for the growth of the transformant. Examples of the carbon source include glucose, dextrin, soluble starch, sucrose and the like; examples of the nitrogen source include inorganic or organic substances such as ammonium salts, nitrate salts, corn steep liquor, peptone, casein, meat extract, soybean cake, potato extract and the like; and examples of the inorganic substance include calcium chloride, sodium dihydrogen phosphate, magnesium chloride and the like. The medium may contain yeast extract, vitamins, growth promoting factor and the like. The pH of the medium is between about 5 about 8 in embodiments.

[0400] As a medium for culturing Escherichia coli, for example, M9 medium containing glucose, casamino acid [Journal of Experiments in Molecular Genetics, 431-433, Cold Spring Harbor Laboratory, New York 1972] can be used. Where necessary, for example, agents such as 3β-indolylacrylic acid may be added to the medium to ensure an efficient function of a promoter. Escherichia coli is cultured at generally about 15 to about 43° C. Where necessary, aeration and stirring may be performed.

[0401] The genus Bacillus is cultured at generally about 30 to about 40° C. Where necessary, aeration and stirring may be performed.

[0402] Examples of the medium for culturing yeast include Burkholder minimum medium [Proc. Natl. Acad. Sci. USA, 77, 4505 (1980)], SD medium containing 0.5% casamino acid [Proc. Natl. Acad. Sci. USA, 81, 5330 (1984)] and the like. The pH of the medium may be between about 5 to about 8. The culture is performed at generally about 20° C. to about 35° C. Where necessary, aeration and stirring may be performed.

[0403] As a medium for culturing an insect cell or insect, for example, Grace's Insect Medium [Nature, 195, 788 (1962)] containing an additive such as inactivated 10% bovine serum and the like as appropriate and the like are used. The pH of the medium is may be between about 6.2 to about 6.4. The culture is performed at generally about 27° C. Where necessary, aeration and stirring may be performed.

[0404] As a medium for culturing an animal cell, for example, minimum essential medium (MEM) containing about 5 to about 20% of fetal bovine serum [Science, 122, 501 (1952)], Dulbecco's modified Eagle medium (DMEM) [Virology, 8, 396 (1959)], RPMI 1640 medium [The Journal of the American Medical Association, 199, 519 (1967)], 199 medium [Proceeding of the Society for the Biological Medicine, 73, 1 (1950)] and the like are used. The pH of the medium may be between about 6 to about 8. The culture is performed at generally about 30° C. to about 40° C. Where necessary, aeration and stirring may be performed.

[0405] As a medium for culturing a plant cell, for example, MS medium, LS medium, B5 medium and the like are used. The pH of the medium may be between about 5- about 8. The culture is performed at generally about 20° C. to about 30° C. Where necessary, aeration and stirring may be performed.

[0406] When a higher eukaryotic cell, such as animal cell, insect cell, plant cell and the like is used as a host cell, a polynucleotide encoding a base editing system of the present disclosure (e.g., comprising an adenosine deaminase variant) is introduced into a host cell under the regulation of an inducible promoter (e.g., metallothionein promoter (induced by heavy metal ion), heat shock protein promoter (induced by heat shock), Tet-ON/Tet-OFF system promoter (induced by addition or removal of tetracycline or a derivative thereof), steroid-responsive promoter (induced by steroid hormone or a derivative thereof) etc.), the induction substance is added to the medium (or removed from the medium) at an appropriate stage to induce expression of the nucleic acid-modifying enzyme complex, culture is performed for a given period to carry out a base editing and, introduction of a mutation into a target gene, transient expression of the base editing system can be realized.

[0407] Prokaryotic cells such as Escherichia coli and the like can utilize an inducible promoter. Examples of the inducible promoter include, but are not limited to, lac promoter (induced by IPTG), cspA promoter (induced by cold shock), araBAD promoter (induced by arabinose) and the like.

[0408] Alternatively, the above-mentioned inductive promoter can also be utilized as a vector removal mechanism when higher eukaryotic cells, such as animal cell, insect cell, plant cell and the like are used as a host cell. That is, a vector is mounted with a replication origin that functions in a host cell, and a nucleic acid encoding a protein necessary for replication (e.g., SV40 on and large T antigen, oriP and EBNA-1 etc. for animal cells), of the expression of the nucleic acid encoding the protein is regulated by the above-mentioned inducible promoter. As a result, while the vector is autonomously replicable in the presence of an induction substance, when the induction substance is removed, autonomous replication is not available, and the vector naturally falls off along with cell division (autonomous replication is not possible by the addition of tetracycline and doxycycline in Tet-OFF system vector).

### Delivery Systems

### Nucleic Acid-Based Delivery of Base Editor Systems

[0409] Nucleic acid molecules encoding a base editor system according to the present disclosure can be administered to subjects or delivered into cells in vitro or in vivo by art-known methods or as described herein. For example, a base editor system comprising a deaminase (e.g., cytidine or adenine deaminase) can be delivered by vectors (e.g., viral or non-viral vectors), or by naked DNA, DNA complexes, lipid nanoparticles, or a combination of the aforementioned compositions. A base editor system may be delivered to a cell using any methods available in the art including, but not limited to, physical methods (e.g., electroporation, particle gun, calcium phosphate transfection), viral methods, non-viral methods (e.g., liposomes, cationic methods, lipid nanoparticles, polymeric nanoparticles), or biological non-viral methods (e.g., attenuated bacterial, engineered bacteriophages, mammalian virus-like particles, biological liposomes, erythrocyte ghosts, exosomes).

[0410] Nanoparticles, which can be organic or inorganic, are useful for delivering a base editor system or component thereof. Nanoparticles are well known in the art and any suitable nanoparticle can be used to deliver a base editor system or component thereof, or a nucleic acid molecule encoding such components. In one example, organic (e.g., lipid and/or polymer) nanoparticles are suitable for use as delivery vehicles in certain embodiments of this disclosure. Non-limiting examples of lipid nanoparticles suitable for use in the methods of the present disclosure include those described in International Patent Application Publications No. WO2022140239, WO2022140252, WO2022140238, WO2022159421, WO2022159472, WO2022159475, WO2022159463, WO2021113365, WO2024019936, and WO2021141969, the disclosures of each of which is incorporated herein by reference in its entirety for all purposes.

### Viral Vectors

[0411] A base editor described herein can be delivered with a viral vector. In some embodiments, a base editor disclosed herein can be encoded on a nucleic acid that is contained in a viral vector. In some embodiments, one or more components of the base editor system can be encoded on one or more viral vectors.

[0412] Viral vectors can include lentivirus (e.g., HIV and FIV-based vectors), Adenovirus (e.g., AD100), Retrovirus (e.g., Maloney murine leukemia virus, MML-V), herpesvirus vectors (e.g., HSV-2), rabies virus (see, e.g., U.S. Patent Application Publication No. US 2022/0290164 A1, the disclosure of which is incorporated herein by reference in its entirety for all purposes), and Adeno-associated viruses (AAVs), or other plasmid or viral vector types, in particular, using formulations and doses from, for example, U.S. Pat. No. 8,454,972 (formulations, doses for adenovirus), U.S. Pat. No. 8,404,658 (formulations, doses for AAV) and U.S. Pat. No. 5,846,946 (formulations, doses for DNA plasmids) and from clinical trials and publications regarding the clinical trials involving lentivirus, AAV and adenovirus. For example, for AAV, the route of administration, formulation and dose can be as in U.S. Pat. No. 8,454,972 and as in clinical trials involving AAV. For Adenovirus, the route of administration, formulation and dose can be as in U.S. Pat. No. 8,404,658 and as in clinical trials involving adenovirus. For plasmid delivery, the route of administration, formulation and dose can be as in U.S. Pat. No. 5,846,946 and as in clinical studies involving plasmids. Doses can be based on or extrapolated to an average 70 kg individual (e.g., a male adult human), and can be adjusted for patients, subjects, mammals of different weight and species. Frequency of administration is within the ambit of the medical or veterinary practitioner (e.g., physician, veterinarian), depending on usual factors including the age, sex, general health, other conditions of the patient or subject and the particular condition or symptoms being addressed. The viral vectors can be injected into the tissue of interest. For cell-type specific base editing, the expression of the base editor and optional guide nucleic acid can be driven by a cell-type specific promoter.

[0413] Viral vectors can be selected based on the application. For example, for in vivo gene delivery, AAV can be advantageous over other viral vectors. In some embodiments, AAV allows low toxicity, which can be due to the purification method not requiring ultra-centrifugation of cell particles that can activate the immune response. In some embodiments, AAV allows low probability of causing insertional mutagenesis because it doesn't integrate into the host genome. Adenoviruses are commonly used as vaccines because of the strong immunogenic response they induce. Packaging capacity of the viral vectors can limit the size of the base editor that can be packaged into the vector.

[0414] AAV has a packaging capacity of about 4.5 Kb or 4.75 Kb including two 145 base inverted terminal repeats (ITRs). This means disclosed base editor as well as a promoter and transcription terminator can fit into a single viral vector. Constructs larger than 4.5 or 4.75 Kb can lead to significantly reduced virus production. For example, SpCas9 is quite large, the gene itself is over 4.1 Kb, which makes it difficult for packing into AAV. Therefore, embodiments of the present disclosure include utilizing a disclosed base editor which is shorter in length than conventional base editors. In some examples, the base editors are less than 4 kb. Disclosed base editors can be less than 4.5 kb, 4.4 kb, 4.3 kb, 4.2 kb, 4.1 kb, 4 kb, 3.9 kb, 3.8 kb, 3.7 kb, 3.6 kb, 3.5 kb, 3.4 kb, 3.3 kb, 3.2 kb, 3.1 kb, 3 kb, 2.9 kb, 2.8 kb, 2.7 kb, 2.6 kb, 2.5 kb, 2 kb, or 1.5 kb. In some embodiments, the disclosed base editors are 4.5 kb or less in length.

[0415] An AAV can be AAV1, AAV2, AAV5, AAV6 or any combination thereof. One can select the type of AAV with regard to the cells to be targeted; e.g., one can select AAV serotypes 1, 2, 5 or a hybrid capsid AAV1, AAV2, AAV5 or any combination thereof for targeting brain or neuronal cells; and one can select AAV4 for targeting cardiac tissue. AAV8 is useful for delivery to the liver. A tabulation of certain AAV serotypes as to these cells can be found in Grimm, D. et al, J. Virol. 82: 5887-5911 (2008)).

[0416] In some embodiments, lentiviral vectors are used to transduce a cell of interest with a polynucleotide encoding a base editor or base editor system as provided herein. Lentiviruses are complex retroviruses that have the ability to infect and express their genes in both mitotic and post-mitotic cells. The most commonly known lentivirus is the human immunodeficiency virus (HIV), which uses the envelope glycoproteins of other viruses to target a broad range of cell types.

[0417] In another embodiment, minimal non-primate lentiviral vectors based on the equine infectious anemia virus (EIAV) are also contemplated. In another embodiment, RetinoStat®, an equine infectious anemia virus-based lentiviral gene therapy vector that expresses angiostatic proteins endostatin and angiostatin that is contemplated to be delivered via a subretinal injection. In another embodiment, use of self-inactivating lentiviral vectors are contemplated.

[0418] Any RNA of the systems, for example a guide RNA or a base editor-encoding mRNA, can be delivered in the form of RNA. Base editor-encoding mRNA can be generated using in vitro transcription. For example, nuclease mRNA can be synthesized using a PCR cassette containing the following elements: T7 promoter, optional kozak sequence (GCCACC), nuclease sequence, and 3′ UTR such as a 3′ UTR from beta globin-polyA tail. The cassette can be used for transcription by T7 polymerase. Guide polynucleotides (e.g., gRNA) can also be transcribed using in vitro transcription from a cassette containing a T7 promoter, followed by the sequence “GG”, and guide polynucleotide sequence.

### Non-Viral Platforms for Gene Transfer

[0419] Non-viral platforms for introducing a heterologous polynucleotide into a cell of interest are known in the art (e.g., lipid nanoparticle-based delivery methods).

[0420] For example, the disclosure provides a method of inserting a heterologous polynucleotide into the genome of a cell using a Cas9 or Cas12 (e.g., Cas12b) ribonucleoprotein complex (RNP)-DNA template complex where an RNP including a Cas9 or Cas12 nuclease domain and a guide RNA, wherein the guide RNA specifically hybridizes to a target region of the genome of the cell, and wherein the Cas nuclease domain cleaves the target region to create an insertion site in the genome of the cell. A DNA template is then used to introduce a heterologous polynucleotide. In embodiments, the DNA template is a double-stranded or single-stranded DNA template, wherein the size of the DNA template is about 200 nucleotides or is greater than about 200 nucleotides, wherein the 5′ and 3′ ends of the DNA template comprise nucleotide sequences that are homologous to genomic sequences flanking the insertion site. In some embodiments, the DNA template is a single-stranded circular DNA template. In embodiments, the molar ratio of RNP to DNA template in the complex is from about 3:1 to about 100:1.

[0421] In some embodiments, the DNA template is a linear DNA template. In some examples, the DNA template is a single-stranded DNA template. In certain embodiments, the single-stranded DNA template is a pure single-stranded DNA template. In some embodiments, the single stranded DNA template is a single-stranded oligodeoxynucleotide (ssODN).

[0422] In other embodiments, a single-stranded DNA (ssDNA) can produce efficient HDR with minimal off-target integration. In one embodiment, an ssDNA phage is used to efficiently and inexpensively produce long circular ssDNA (cssDNA) donors. These cssDNA donors serve as efficient HDR templates when used with Cas9 or Cas12 (e.g., Cas12a, Cas12b), with integration frequencies superior to linear ssDNA (QssDNA) donors.

### Inteins

[0423] Inteins (intervening protein) are auto-processing domains found in a variety of diverse organisms, which carry out a process known as protein splicing.

[0424] Non-limiting examples of inteins include any intein or intein-pair known in the art, which include a synthetic intein based on the dnaE intein, the Cfa-N (e.g., split intein-N) and Cfa-C (e.g., split intein-C) intein pair, has been described (e.g., in Stevens et al., J Am Chem Soc. 2016 Feb. 24; 138(7):2162-5, incorporated herein by reference), and DnaE. Non-limiting examples of pairs of inteins that may be used in accordance with the present disclosure include: Cfa DnaE intein, Ssp GyrB intein, Ssp DnaX intein, Ter DnaE3 intein, Ter ThyX intein, Rma DnaB intein and Cne Prp8 intein (e.g., as described in U.S. Pat. No. 8,394,604, incorporated herein by reference). Exemplary nucleotide and amino acid sequences of inteins are provided in the Sequence Listing at SEQ ID NOs: 370-377 and 389-424. Inteins suitable for use in embodiments of the present disclosure and methods for use thereof are described in U.S. Pat. No. 10,526,401, International Patent Application Publication No. WO 2013/045632, and in U.S. Patent Application Publication No. US 2020/0055900, the full disclosures of which are incorporated herein by reference in their entireties by reference for all purposes.

[0425] Intein-N and intein-C may be fused to the N-terminal portion of a split Cas9 and the C-terminal portion of the split Cas9, respectively, for the joining of the N-terminal portion of the split Cas9 and the C-terminal portion of the split Cas9. For example, in some embodiments, an intein-N is fused to the C-terminus of the N-terminal portion of the split Cas9, i.e., to form a structure of N-[N-terminal portion of the split Cas9]-[intein-N]-C. In some embodiments, an intein-C is fused to the N-terminus of the C-terminal portion of the split Cas9, i.e., to form a structure of N-[intein-C]-[C-terminal portion of the split Cas9]-C. In embodiments, a base editor is encoded by two polynucleotides, where one polynucleotide encodes a fragment of the base editor fused to an intein-N and another polynucleotide encodes a fragment of the base editor fused to an intein-C. Methods for designing and using inteins are known in the art and described, for example by WO2014004336, WO2017132580, WO2013045632A1, US20150344549, and US20180127780, each of which is incorporated herein by reference in their entirety.

[0426] In some embodiments, an ABE was split into N- and C-terminal fragments at Ala, Ser, Thr, or Cys residues within selected regions of SpCas9. These regions correspond to loop regions identified by Cas9 crystal structure analysis.

[0427] The N-terminus of each fragment is fused to an intein-N and the C-terminus of each fragment is fused to an intein C at amino acid positions S303, T310, T313, S355, A456, S460, A463, T466, S469, T472, T474, C574, S577, A589, and S590, referenced to SEQ ID NO: 197.

### Pharmaceutical Compositions

[0428] In some aspects, the present disclosure provides a pharmaceutical composition comprising any of the cells, polynucleotides, vectors, base editors, base editor systems, guide polynucleotides, fusion proteins, complexes, or the fusion protein-guide polynucleotide complexes described herein.

[0429] The pharmaceutical compositions of the present disclosure can be prepared in accordance with known techniques. See, e.g., Remington, The Science And Practice of Pharmacy (21st ed. 2005). In general, the cell, or population thereof is admixed with a suitable carrier prior to administration or storage, and in some embodiments, the pharmaceutical composition further comprises a pharmaceutically acceptable carrier. Suitable pharmaceutically acceptable carriers generally comprise inert substances that aid in administering the pharmaceutical composition to a subject, aid in processing the pharmaceutical compositions into deliverable preparations, or aid in storing the pharmaceutical composition prior to administration. Pharmaceutically acceptable carriers can include agents that can stabilize, optimize or otherwise alter the form, consistency, viscosity, pH, pharmacokinetics, solubility of the formulation. Such agents include buffering agents, wetting agents, emulsifying agents, diluents, encapsulating agents, and skin penetration enhancers. For example, carriers can include, but are not limited to, saline, buffered saline, dextrose, arginine, sucrose, water, glycerol, ethanol, sorbitol, dextran, sodium carboxymethyl cellulose, and combinations thereof.

[0430] In some embodiments, the pharmaceutical composition is formulated for delivery to a subject. Suitable routes of administrating the pharmaceutical composition described herein include, without limitation: topical, subcutaneous, transdermal, intradermal, intralesional, intraarticular, intraperitoneal, intravesical, transmucosal, gingival, intradental, intracochlear, transtympanic, intraorgan, epidural, intrathecal, intramuscular, intravenous, intravascular, intraosseus, periocular, intratumoral, intracerebral, and intracerebroventricular administration.

[0431] In some embodiments, the pharmaceutical composition described herein is administered locally to a diseased site. In some embodiments, the pharmaceutical composition described herein is administered to a subject by injection, by means of a catheter, by means of a suppository, or by means of an implant, the implant being of a porous, non-porous, or gelatinous material, including a membrane, such as a sialastic membrane, or a fiber.

[0432] In some embodiments, any of the fusion proteins, gRNAs, and/or complexes described herein are provided as part of a pharmaceutical composition. In some embodiments, the pharmaceutical composition comprises any of the fusion proteins or complexes provided herein. In some embodiments pharmaceutical composition comprises a gRNA, a nucleic acid programmable DNA binding protein, a cationic lipid, and a pharmaceutically acceptable excipient. In embodiments, pharmaceutical compositions comprise a lipid nanoparticle and a pharmaceutically acceptable excipient. In embodiments, the lipid nanoparticle contains a gRNA, a base editor, a complex, a base editor system, or a component thereof of the present disclosure, and/or one or more polynucleotides encoding the same. Pharmaceutical compositions can optionally comprise one or more additional therapeutically active substances.

[0433] The compositions, as described above, can be administered in effective amounts. The effective amount will depend upon the mode of administration, the particular condition being treated, and the desired outcome. It may also depend upon the stage of the condition, the age and physical condition of the subject, the nature of concurrent therapy, if any, and like factors well-known to the medical practitioner. For therapeutic applications, it is that amount sufficient to achieve a medically desirable result.

[0434] In some embodiments, compositions in accordance with the present disclosure can be used for treatment of any of a variety of diseases, disorders, and/or conditions.

### Methods of Treatment

[0435] Some aspects of the present disclosure provide methods of treating a subject in need, the method comprising administering to a subject in need an effective therapeutic amount of a pharmaceutical composition as described herein. More specifically, the methods of treatment include administering to a subject in need thereof one or more pharmaceutical compositions comprising one or more cells having at least one edited gene. In other embodiments, the methods of the disclosure comprise expressing or introducing into a cell a base editor polypeptide and one or more guide RNAs capable of targeting a nucleic acid molecule encoding at least one polypeptide.

[0436] One of ordinary skill in the art would recognize that multiple administrations of the pharmaceutical compositions contemplated in particular embodiments may be required to affect the desired therapy. For example, a composition may be administered to the subject 1, 2, 3, 4, 5, 6, 7, 8, 9, or 10 or more times over a span of 1 week, 2 weeks, 3 weeks, 1 month, 2 months, 3 months, 4 months, 5 months, 6 months, 1 year, 2 years, 5, years, 10 years, or more.

[0437] Administration of the pharmaceutical compositions contemplated herein may be carried out using conventional techniques including, but not limited to, infusion, transfusion, or parenterally. In some embodiments, parenteral administration includes infusing or injecting intravascularly, intravenously, intramuscularly, intraarterially, intrathecally, intratumorally, intradermally, intraperitoneally, transtracheally, subcutaneously, subcuticularly, intraarticularly, subcapsularly, subarachnoidly and intrasternally.

### Kits

[0438] The disclosure provides kits for the treatment of an alpha-1 antitrypsin deficiency in a subject. In some embodiments, the kit further includes a base editor system or a polynucleotide encoding a base editor system, wherein the base editor polypeptide system a nucleic acid programmable DNA binding protein (napDNAbp), a deaminase, and a guide RNA. In some embodiments, the napDNAbp is Cas9 or Cas12. In some embodiments, the polynucleotide encoding the base editor is a mRNA sequence. In some embodiments, the deaminase is an adenosine deaminase. In some embodiments, the kit comprises an edited cell and instructions regarding the use of such cell.

[0439] The kits may further comprise written instructions for using a base editor, base editor system and/or edited cell as described herein. In other embodiments, the instructions include at least one of the following: precautions; warnings; clinical studies; and/or references. The instructions may be printed directly on the container (when present), or as a label applied to the container, or as a separate sheet, pamphlet, card, or folder supplied in or with the container. In a further embodiment, a kit comprises instructions in the form of a label or separate insert (package insert) for suitable operational parameters. In yet another embodiment, the kit comprises one or more containers with appropriate positive and negative controls or control samples, to be used as standard(s) for detection, calibration, or normalization. The kit can further comprise a second container comprising a pharmaceutically-acceptable buffer, such as (sterile) phosphate-buffered saline, Ringer's solution, or dextrose solution. It can further include other materials desirable from a commercial and user standpoint, including other buffers, diluents, filters, needles, syringes, and package inserts with instructions for use.

[0440] The practice of embodiments of the present disclosure employs, unless otherwise indicated, conventional techniques of molecular biology (including recombinant techniques), microbiology, cell biology, biochemistry and immunology, which are well within the purview of the skilled artisan. Such techniques are explained fully in the literature, such as, “Molecular Cloning: A Laboratory Manual”, second edition (Sambrook, 1989); “Oligonucleotide Synthesis” (Gait, 1984); “Animal Cell Culture” (Freshney, 1987); “Methods in Enzymology” “Handbook of Experimental Immunology” (Weir, 1996); “Gene Transfer Vectors for Mammalian Cells” (Miller and Calos, 1987); “Current Protocols in Molecular Biology” (Ausubel, 1987); “PCR: The Polymerase Chain Reaction”, (Mullis, 1994); “Current Protocols in Immunology” (Coligan, 1991). These techniques are applicable to the production of the polynucleotides and polypeptides of the disclosure, and, as such, may be considered in making and practicing embodiments of the disclosure. Particularly useful techniques for particular embodiments will be discussed in the sections that follow.

[0441] The following examples are put forth so as to provide those of ordinary skill in the art with a complete disclosure and description of how to make and use the assay, screening, and therapeutic methods of the disclosure, and are not intended to limit the scope of what the inventors regard as their invention.

### EXAMPLES

### Example 1: Screening and Rational Design for ABEs

[0442] Yeast-based screens and structure-based design was performed to optimize editors to improve selectivity for NGC PAM and the Alpha-1 target site (FIG. 1). Schematics depicting yeast-based screens and structure-based design to optimize editors for improving selectivity for NGC PAM and the A1AT target site are shown in FIG. 2.

[0443] Hundreds of editor variants identified by the various screens and structure-based approaches were tested in patient fibroblasts for on-target editing. Guide-dependent off target editing at candidate OT sites and guide-independent off target editing using the sensitive R-loop assay were also performed in patient fibroblasts. High performing editors were tested at a sub-saturating dose of 0.25 mpk (mg/kg) against var12 codon optimized in vivo in two studies (SBTx760 and SBTx850) performed in NSG-PiZ mice (a widely accepted model of AATD). 9 editors were advanced into rhAmp-seq guide-dependent off-target editing in primary hepatocytes. These experiments culminated in the identification of the new high-performing development candidates FIG. 3.

### Set 1: NGC Evolution.

[0444] For this yeast evolution, a dual-selection system was used: the on-target selection was targeting an NGC target site in an inactivated blasiticin resistant (BlaR) gene, and the A6G editing resulted in restoration of the function of BlaR gene. For off-target selection, three guides were targeting the same stop codon in an inactivated mCherry gene, and their target sites were with NGA, NGG, NGT PAM, respectively. The A to G editing activities guided by any of the three guides resulted in mCherry signal. The yeast cells were transformed with a library of base editors derived from Var12. This library was designed to contain all the possible combinations of mutations that were rationally designed based on the crystal structure of Cas9, focusing on mutating all the residues important for recognizing the 3rd nucleotide in the PAM sequence. After culturing the yeast cells containing both selection plasmid and base editor plasmid, a two-step selection was performed to select for high NGC activity (Bla drug selection) and low NGD activity (flow sort for mCherry-population). Mutations identified in the screen for Cas9 (SpCas9-MQKFRAER nickase) are provided in Table 7, below.

[0445] Wild-type HEK293T cells were transfected in 96-well format and each well contained plasmids expressing base editor variants and plasmids expressing guides. To calculate average on-target editing efficiency, each editor was co-transfected with plasmids expressing guides targeting A1 target site without E342K mutation, and 2 other NGC target sites, respectively. To calculate average off-target editing efficiency, each editor was co-transfected with guides targeting A1 target site, and OT editing were measured at identified OT target site OT1/2/4. Results are laid out in Table 8. Editing efficiency of variants identified in the screen were tested in in patient derived fibroblast cells (PiZZ cells), which were transfected with mRNA encoding the indicated variants and synthetic guides by electroporation (FIG. 4).

TABLE 7
List of mutations identified in SpCas9-
MQKFRAER nickase for Screen 1.

| plasmid number | Mutation in SpCas9-MQKFRAER nickase |
|---|---|
| pYY-1301 | W1126R |
| pYY-1302 | R1359W |
| pYY-1303 | E1250K |
| pYY-1304 | A1239T |
| pYY-1305 | A1239V |
| pYY-1306 | E1335D |
| pYY-1307 | M1135L |
| pYY-1308 | M1135R |
| pYY-1309 | M1135W |
| pYY-1310 | Q1136H |
| pYY-1311 | Q1136Y |
| pYY-1312 | K1218D |
| pYY-1313 | K1218R |
| pYY-1314 | K1218E |
| pYY-1315 | K1218L |
| pYY-1316 | F1219K |
| pYY-1317 | F1219N |
| pYY-1318 | R1322A |
| pYY-1319 | R1322K |
| pYY-1320 | R1337K |
| pYY-1321 | R1337T |
| pYY-1322 | M1135L Q1136H |
| pYY-1323 | M1135R Q1136H |
| pYY-1324 | M1135L Q1136Y |
| pYY-1325 | M1135R Q1136Y |
| pYY-1326 | K1218D F1219K |
| pYY-1327 | K1218R F1219K |
| pYY-1328 | E1335D R1337K |
| pYY-1329 | M1135R Q1136H K1218D R1322K E1335D R1337K |
| pYY-1330 | M1135V Q1136H K1218D R1322K E1335D R1337K |

TABLE 8
Analysis of off target and on target editing for ABE variants.
Exemplary mutants in SpCas9-MQKFRAER nickase.

| | Off | On | On/Off | |
|---|---|---|---|---|
| Plasmid | Target | Target | Ratio | Mutant Cas9 |
| pYY-1303 | 21.8 | 56.4 | 2.6 | E1250K |
| pYY-1313 | 19.1 | 54.3 | 2.8 | K1218R |
| pYY-1320 | 13.6 | 53.7 | 4 | R1337K |
| pYY-1311 | 15.1 | 53.2 | 3.5 | Q1136Y |
| pYY-1309 | 15.3 | 52.7 | 3.4 | M1135W |
| pYY-1307 | 16.5 | 52.6 | 3.2 | M1135L |
| pYY-1319 | 16.7 | 52.4 | 3.1 | R1322K |
| pYY-1306 | 12.1 | 52.2 | 4.3 | E1335D |
| pYY-1171 | 19.3 | 52.2 | 2.7 | WT |
| pYY-1318 | 13.3 | 52.2 | 3.9 | R1322A |
| pYY-1321 | 10.8 | 52.1 | 4.8 | R1337T |
| pYY-1312 | 9.5 | 51.6 | 5.4 | K1218D |
| pYY-1301 | 13.8 | 51.5 | 3.7 | W1126R |
| pYY-1310 | 12.5 | 51 | 4.1 | Q1136H |
| pYY-1324 | 12.2 | 51 | 4.2 | M1135L Q1136Y |
| pYY-1315 | 13 | 50.3 | 3.9 | K1218L |
| pYY-1302 | 12.6 | 49.7 | 4 | R1359W |
| pYY-1322 | 11.6 | 49.1 | 4.2 | M1135L Q1136H |
| pYY-1314 | 9.9 | 48.7 | 4.9 | K1218E |
| pYY-1328 | 3.7 | 47.9 | 12.8 | E1335D R1337K |
| pYY-1304 | 12.6 | 47.8 | 3.8 | A1239T |
| pYY-1308 | 12 | 47.8 | 4 | M1135R |
| pYY-1323 | 9.1 | 47.6 | 5.2 | M1135R Q1136H |
| pYY-1305 | 12.2 | 47.1 | 3.9 | A1239V |
| pYY-1325 | 6.3 | 45.8 | 7.2 | M1135R Q1136Y |
| pYY-1317 | 12 | 44.1 | 3.7 | F1219N |
| pYY-1316 | 2.8 | 41.4 | 14.9 | F1219K |
| pYY-1327 | 2.7 | 39.9 | 15 | K1218R F1219K |
| pYY-1326 | 1.4 | 37.2 | 27.4 | K1218D F1219K |
| pYY-1329 | 0.2 | 26 | 170.4 | M1135R Q1136H |
| | | | | K1218D R1322K |
| | | | | E1335D R1337K |
| pYY-1330 | 0.1 | 18.9 | 164.9 | M1135V Q1136H |
| | | | | K1218D R1322K |
| | | | | E1335D R1337K |

### Set 2: Linker Rational Design

[0446] Seventeen linkers were predicted to position deaminase near A7 in the editing window using Rosseta fold 2. A list of the linkers identified in this rational design study are provided in Table 9.

TABLE 9
List of rationally designed
linker sequences.

| Linkers | SEQ ID NO |
|---|---|
| STDTTKDTSPKPQDKI | 497 |
| STDANAHSDISTGDKI | 498 |
| STDEDKRSDLGKQDKI | 499 |
| STDEKDQQPNSTSDKI | 500 |
| STDQKGQKIPSSNDKI | 501 |
| STDDRSQKQDQQDDKI | 502 |
| STDSKSVPLSSDGDKI | 503 |
| STDRQPRKDNSSGDKI | 504 |
| STDKEGDQPPPPKDKI | 505 |
| STDDVEYYSRPPDDKI | 506 |
| STDDPRKREIPPPDKI | 507 |
| STDERQHSTPTTDDKI | 508 |
| STDSSKQPENPPQDKI | 509 |
| STDPGGAPETNSGDKI | 510 |
| STDNISLSYDQQDDKI | 511 |
| STDSKSQQFVTYEDKI | 512 |
| STDLTESRPPQESDKI | 513 |

### Set 3: Linker-Evolution

[0447] Guide-specific yeast evolution was used to select for optimal linkers from two linker libraries: one was a 12 aa random linker library composed of 5 amino acids: E, K, G, S, P; the other was computationally designed linkers for optimal A7 editing, see Table 10 and Table 11. The guide-specific yeast evolution was an evolution strategy that allowed evolving BEs/Cas enzymes towards any user-defined target site. This evolution was performed with a defined SpCas9 guide (the A1AT guide in this case), and the base editor first edited target site 1. Target site 1 was the crRNA region in a Cas12a guide, and target site 1 had the same sequence as the A1AT target site. This Cas12a guide was expressed with Cas12a protein. When target site 1 was edited by the base editor, the Cas12a complex recognized target site 2 in a disrupted EGFP gene and resulted in a DSB in the gene. This was followed by HDR repair resulting in functional EGFP gene. When the target site 1 was not edited by the base editor, the Cas12a complex was not be able to recognize target site 2, and there was no EGFP signal. This strategy allowed for selection of linkers in BEs that improved potency for A1AT target site. Editing results of variants having different linker sequences can be seen in FIGS. 5A-5D, FIGS. 6A-6B, and FIGS. 7A-7B.

TABLE 10
Linkers identified in Set 3,
linker evolution.

| Plasmid | Linker | SEQ ID NO |
|---|---|---|
| pYY-1331 | EGSSSKEEEEPG | 514 |
| pYY-1332 | NSISSSNGQK | 515 |
| pYY-1333 | GEEGEGSGGGEK | 516 |
| pYY-1334 | EGEGGKESGSSE | 517 |
| pYY-1335 | GGGGSSKSPGSE | 518 |
| pYY-1336 | PIGSDQDD | 519 |
| pYY-1337 | TEKGQVPHGS | 520 |
| pYY-1338 | ESGEGGGGSEKK | 521 |
| pYY-1339 | EEGKPKEGEGSG | 522 |
| pYY-1340 | ASREPKDSS | 523 |
| pYY-1341 | KQGSEHDE | 524 |
| pYY-1342 | SESKSEKGSSEK | 525 |
| pYY-1343 | QYDSGERSDQ | 526 |
| pYY-1344 | PGANEEIPGQ | 527 |
| pYY-1345 | NSPTDEK | 528 |
| pYY-1346 | EGANEEIPGQ | 529 |
| pYY-1347 | EGEKEKKKSGES | 530 |
| pYY-1348 | PGRHEEVPGQ | 531 |
| pYY-1349 | SKHQTEQDDS | 532 |
| pYY-1350 | ESEDDSSGRK | 533 |

TABLE 11
Linkers identified in Set 3
linker evolution.

| Plasmid | Linker | SEQ ID NO |
|---|---|---|
| pYY-1351 | KESEKKESESKS | 534 |
| pYY-1352 | KGEGKSSIKD | 535 |
| pYY-1353 | DRSQKQDQQD | 536 |
| pYY-1354 | GPSSTSSS | 537 |
| pYY-1355 | GSSGEKEEGEPS | 538 |
| pYY-1356 | GEPKSKKSGSGS | 539 |
| pYY-1357 | SSGEGGKSESGP | 540 |
| pYY-1358 | SPQPTSSD | 541 |
| pYY-1359 | EGGSEEEEESGS | 542 |
| pYY-1360 | KGPKPKKEESEK | 439 |
| pYY-1361 | SKSQQFVTYE | 544 |
| pYY-1362 | TGNSKYQTGK | 545 |
| pYY-1363 | PQPIPHTNPT | 546 |
| pYY-1364 | ANAHSDISTG | 547 |
| pYY-1365 | KSQQTEDQSK | 548 |
| pYY-1366 | QSQDQKQKEH | 549 |
| pYY-1367 | NQQRPSSD | 550 |
| pYY-1368 | TTKDTSPKPQ | 551 |
| pYY-1369 | EGKDNQQTGE | 552 |
| pYY-1370 | EPQPDSSE | 553 |
| pYY-1371 | KESEKKESESKS | 534 |
| pYY-1372 | KGEGKSSIKD | 535 |
| pYY-1373 | DRSQKQDQQD | 536 |
| pYY-1374 | GPSSTSSS | 537 |
| pYY-1375 | GSSGEKEEGEPS | 538 |
| pYY-1376 | GEPKSKKSGSGS | 539 |
| pYY-1377 | SSGEGGKSESGP | 540 |
| pYY-1378 | SPQPTSSD | 541 |
| pYY-1379 | EGGSEEEEESGS | 542 |
| pYY-1380 | KGPKPKKEESEK | 439 |
| pYY-1381 | SKSQQFVTYE | 544 |
| pYY-1382 | TGNSKYQTGK | 545 |
| pYY-1383 | PQPIPHTNPT | 546 |
| pYY-1384 | ANAHSDISTG | 547 |
| pYY-1385 | KSQQTEDQSK | 548 |
| pYY-1386 | QSQDQKQKEH | 549 |
| pYY-1387 | NQQRPSSD | 550 |
| pYY-1388 | TTKDTSPKPQ | 551 |
| pYY-1389 | EGKDNQQTGE | 552 |
| pYY-1390 | EPQPDSSE | 553 |

### Set 4: Trinucleotide Specific TadA-Rational Design

[0448] Rational design of TadA mutations that changes the trinucleotide motif preference for TadA, based on the TadA crystal structure was performed. Trinucleotide motif preference for deaminase (TadA), refers to the preference for the nucleotides flanking the target nucleotide—the “NAN” motif in the protospacer sequence where the A is the target for TadA. Mutations in TadA (e.g., TadA*7.10 of Variant 12) identified in the rational design are shown in Table 12. Results for % A to G editing of ABE variants identified in this screen for single and double TadA mutations are shown in FIG. 8 and FIG. 9, respectively.

TABLE 12
TadA mutations identified in Set 4, TadA-rational design.

| Plasmid Number | Mutation in TadA |
|---|---|
| pYY-1401 | F84Y |
| pYY-1402 | A109L |
| pYY-1403 | A109V |
| pYY-1404 | A109I |
| pYY-1405 | A109F |
| pYY-1406 | A109S |
| pYY-1407 | A109T |
| pYY-1408 | A109N |
| pYY-1409 | V155S |
| pYY-1410 | V155T |
| pYY-1411 | V155N |
| pYY-1412 | F156Y |
| pYY-1413 | F156W |
| pYY-1414 | F156R |
| pYY-1415 | F156N |
| pYY-1416 | F156Q |
| pYY-1417 | F84Y A109L |
| pYY-1418 | F84Y A109S |
| pYY-1419 | F84Y V155S |
| pYY-1420 | F84Y V155N |
| pYY-1421 | F84Y F156R |
| pYY-1422 | F84Y F156N |
| pYY-1423 | F84Y F156Q |
| pYY-1424 | A109L V155S |
| pYY-1425 | A109L V155N |
| pYY-1426 | A109L F156R |
| pYY-1427 | A109L F156N |
| pYY-1428 | A109L F156Q |
| pYY-1429 | A109S V155S |
| pYY-1430 | A109S V155N |
| pYY-1431 | A109S F156R |
| pYY-1432 | A109S F156N |
| pYY-1433 | A109S F156Q |
| pYY-1434 | V155S F156R |
| pYY-1435 | V155S F156N |
| pYY-1436 | V155S F156Q |
| pYY-1437 | V155N F156R |
| pYY-1438 | V155N F156N |
| pYY-1439 | V155N F156Q |
| pYY-1440 | F84Y A109L V155S |
| pYY-1441 | F84Y A109L V155N |
| pYY-1442 | F84Y A109S V155S |
| pYY-1443 | F84Y A109S V155N |
| pYY-1444 | A109L V155SF156N |
| pYY-1445 | A109L V155N F156N |
| pYY-1446 | A109S V155S F156N |
| pYY-1447 | A109S V155N F156N |
| pYY-1448 | F84Y A109L V155S F156N |

### Set 5: Hi-Fi Cas9-Rational Design

[0449] Rational design of Cas9 HiFi mutations (e.g., for mapping onto SpCas9-MQKFRAFR nickase) were based on the cyro-EM structure of base editors with A1AT on-target substrate and off-target substrate. Cyro-EM structures of Variant12/A1 guide/A1 on-target sequences or one of A1 guided off-target sequences were obtained. Mutations that could reduce guided off-target (HiFi mutations) were predicted by comparing these two Cryo-EM structures. A list of Cas9 mutations identified in the rational design are shown in Table 13. Results for % A to G editing of ABE variants identified in this screen (NGC Cas9) in patient derived fibroblast cells (PiZZ cells) are shown in FIG. 10 and FIG. 11.

TABLE 13
Cas9 mutations identified in Set 5, Hi-Fi Cas9-rational design.

| Plasmid | |
|---|---|
| Number | Mutation in Mutation in SpCas9-MQKFRAER nickase |
| pYY-1451 | S217A |
| pYY-1452 | K218A |
| pYY-1453 | S219A |
| pYY-1454 | R220A |
| pYY-1455 | R221A |
| pYY-1456 | S217A/K218A |
| pYY-1457 | R220A/R221A |
| pYY-1458 | S219A/R220A/R221A |
| pYY-1459 | S217A/K218A/S219A/R220A/R221A |
| pYY-1460 | D699K |
| pYY-1461 | D700K |
| pYY-1462 | D699K/D700K |
| pYY-1463 | R765A |
| pYY-1464 | Q768A |
| pYY-1465 | K772A |
| pYY-1466 | K775A |
| pYY-1467 | R765A/Q768A |
| pYY-1468 | K772A/K775A |
| pYY-1469 | R765A/Q768A/K772A/K775A |
| pYY-1470 | K913A |
| pYY-1471 | K918A |
| pYY-1472 | R919A |
| pYY-1473 | K913A/K918A/R919A |
| pYY-1474 | K877A |
| pYY-1475 | K878A |
| pYY-1476 | K880A |
| pYY-1477 | R884A |
| pYY-1478 | R895A/K896A |
| pYY-1479 | K877A/K878A/K880A/R884A/K890A |
| pYY-1480 | K877A/K878A/K880A/R884A/K890A/R895A/K896A |

Set 6: TadA Guide-Specific Evolution with Counter Selection.

[0450] Guide specific evolution is explained above in Set 3 and off-target selection is explained above in Set 1. A TadA5 library with 2 mutations per construct was made and selected using these two selection strategies. The goal was to develop an improved TadA for use in targeting SERPINA1. TadA7.10, and variants thereof, typically show high activities across different target sites. A new evolution of TadA specific for the A1AT target site was designed by starting with an earlier version of TadA, TadA5, which only showed moderate activity on a few sites and very low activity on most sites. Both guide-specific yeast evolution and off-target selection were used in this evolution. The guide-specific yeast evolution was an evolution strategy that allowed evolving BEs/Cas enzymes toward any user-defined target site. This evolution was performed with a defined SpCas9 guide (targeting SERPINA1), and the base editor first edited target site 1. Target site 1 was the crRNA region in a Cas12a guide, and target site 1 had the same sequence as the A1AT target site. This Cas12a guide was expressed with Cas12a protein. When target site 1 was edited by the base editor, the Cas12a complex recognized target site 2 in a disrupted EGFP gene and resulted in a DSB in the gene. This was followed by HDR repair resulting in a functional EGFP gene. When the target site 1 was not edited by the base editor, the Cas12a complex was not be able to recognize target site 2, and there was no EGFP signal. This strategy enabled selection of BEs that improved potency for A1AT target site. For off-target selection, three guides were targeting the same stop codon in an inactivated mCherry gene, and their target sites were with NGA, NGG, NGT PAM, respectively. The A to G editing activities guided by any of the three guides resulted in mCherry signal. Yeast cells were transformed with a library of base editors derived from TadA5+Variant 12 Cas9 (SpCas9-MQKFRAER nickase). This TadA5 library was designed to contain 2 mutations per construct, and this library covers all the possible mutations on any 2 positions in TadA5. After culturing the yeast cells containing both selection plasmid and base editor plasmid, yeast cells with high EGFP signal and low mcherry signal were selected. Mutations in TadA5 (mappable onto TadA*7.10 of Variant 12) identified in the screen are shown in Table 14. Results for % A to G editing of ABE variants having TadA mutations identified in this screen are shown in FIG. 12.

TABLE 14
TadA mutations identified in Set 6, TadA guide-
specific evolution with counter selection.

| Plasmid Number | Mutation in TadA |
|---|---|
| pYY-1500 | TadA5 |
| pYY-1501 | E3K |
| pYY-1502 | A114C, E140L, W23I |
| pYY-1503 | G100V, P29T |
| pYY-1504 | L145R, G42M |
| pYY-1505 | I132K |
| pYY-1506 | V102S, G115E |
| pYY-1507 | V102E |
| pYY-1508 | D119L |
| pYY-1509 | L144Q |
| pYY-1510 | Y147A |
| pYY-1511 | M118L |
| pYY-1512 | R107A, L63F |
| pYY-1513 | A62V |
| pYY-1514 | E3G, I132T, F6A |
| pYY-1515 | W23R, P48A, R152P, TadA7.10 |
| pYY-1516 | V82S, TadA5 |
| pYY-1517 | V82S, E3K |
| pYY-1518 | V82S, A114C, E140L, W23I |
| pYY-1519 | V82S, G100V, P29T |
| pYY-1520 | V82S, L145R, G42M |
| pYY-1521 | V82S, I132K |
| pYY-1522 | V82S, V102S, G115E |
| pYY-1523 | V82S, V102E |
| pYY-1524 | V82S, D119L |
| pYY-1525 | V82S, L144Q |
| pYY-1526 | V82S, Y147A |
| pYY-1527 | V82S, M118L |
| pYY-1528 | V82S, R107A, L63F |
| pYY-1529 | V82S, A62V |
| pYY-1530 | V82S, E3G, I132T, F6A |
| pYY-1531 | V82S, TadA7.10 |
| pYY-1532 | Tad8.8 |
| pYY-1533 | Tad8.20 |
| pYY-1534 | Y81V, L18A |
| pYY-1535 | G50A, H122T, A142S, P29Q, L36S |
| pYY-1536 | L145R, G42M |
| pYY-1537 | G67N |
| pYY-1538 | N72Y, F156N, H128R |
| pYY-1539 | P124K |
| pYY-1540 | N38D, P124Q, L68V |
| pYY-1541 | P29Y, M94R, A142N |
| pYY-1542 | K160E, H14D |
| pYY-1543 | V82S, Y81V, L18A |
| pYY-1544 | V82S, G50A, H122T, A142S, P29Q, L36S |
| pYY-1545 | V82S, L145R, G42M |
| pYY-1546 | V82S, G67N |
| pYY-1547 | V82S, N72Y, F156N, H128R |
| pYY-1548 | V82S, P124K |
| pYY-1549 | V82S, N38D, P124Q, L68V |
| pYY-1550 | V82S, P29Y, M94R, A142N |
| pYY-1551 | V82S, K160E, H14D |
| pYY-1552 | E3N |
| pYY-1553 | I132T |
| pYY-1554 | L63R |
| pYY-1555 | N46Y |
| pYY-1556 | V35Q, V130F |
| pYY-1557 | T79H, L145N |
| pYY-1558 | F149A |
| pYY-1559 | G67N |
| pYY-1560 | Q65R |
| pYY-1561 | M70I |
| pYY-1562 | P124H |
| pYY-1563 | H52L |
| pYY-1564 | V82S, E3N |
| pYY-1565 | V82S, I132T |
| pYY-1566 | V82S, L63R |
| pYY-1567 | V82S, N46Y |
| pYY-1568 | V82S, V35Q, V130F |
| pYY-1569 | V82S, T79H, L145N |
| pYY-1570 | V82S, F149A |
| pYY-1571 | V82S, G67N |
| pYY-1572 | V82S, Q65R |
| pYY-1573 | V82S, M70I |
| pYY-1574 | V82S, P124H |
| pYY-1575 | V82S, H52L |

Sets 7 and 8: Cas9 Guide-Specific Evolution with Counter Selection.

[0451] Guide specific evolution is explained above in Set 3, and off-target selection explained above in Set 1. A Cas9 N-terminal error-prone library (Set 7) and PI domain error-prone library (Set 8) were made and selected using these two selection strategies. Both guide-specific yeast evolution and off-target selection were used in this evolution. Guide-specific yeast evolution was an evolution strategy that allowed evolving BEs/Cas enzymes towards any user-defined target site. This evolution was performed with a defined SpCas9 guide (targeting SERPINA1), and the base editor first edited target site 1. Target site 1 was the crRNA region in a Cas12a guide, and target site 1 had the same sequence as the A1AT target site. This Cas12a guide was expressed with Cas12a protein. When target site 1 was edited by the base editor, the Cas12a complex recognized target site 2 in a disrupted EGFP gene, and resulted in a DSB in the gene. This was followed by HDR repair resulting in a functional EGFP gene. When the target site 1 was not edited by the base editor, the Cas12a complex was not be able to recognize target site 2, and there was no EGFP signal. Using this strategy, enabled selection of linkers in BEs that improved potency for the A1AT target site.

[0452] For off-target selection, three guides were targeting the same stop codon in an inactivated mCherry gene, and their target sites were with NGA, NGG, NGT PAM, respectively. The A to G editing activities guided by any of the three guides resulted in mCherry signal. The yeast cells were transformed with a library of base editors derived from Variant 12 NGC Cas9. This library contained random mutations in N-term Cas9 (aa 1-350) or Cas9 PI domain, and these random mutations were introduced by error-prone PCR. After culturing the yeast cells containing both selection plasmid and base editor plasmid, yeast cells with high EGFP signal and low mcherry signal were selected. Mutations in SpCas9-MQKFRAER nickase identified in the screen are shown in Table 15 and Table 16. Results for % A to G editing of ABE variants having SpCas9-MQKFRAER nickase mutations identified in this screen are shown in FIG. 13, FIG. 14, FIG. 15, and FIG. 16. Proposed combinations of mutations in Variant 12 TadA*7.10 and SpCas9-MQKFRAER nickase are listed in Table 17.

TABLE 15
Cas9 mutations identified in Set 7, Cas9 guide-specific evolution with
counter selection, using a Cas9 N-terminal error-prone library.

| Plasmid Number | Mutation in SpCas9-MQKFRAER nickase |
|---|---|
| pYY-1601 | W18R |
| pYY-1602 | R40W |
| pYY-1603 | I48V |
| pYY-1604 | T58A |
| pYY-1605 | K65R |
| pYY-1606 | K76R |
| pYY-1607 | I85T |
| pYY-1608 | V93A |
| pYY-1609 | D94G |
| pYY-1610 | S96G |
| pYY-1611 | F119I |
| pYY-1612 | H129L |
| pYY-1613 | Y136H |
| pYY-1614 | L138Q |
| pYY-1615 | A159V |
| pYY-1616 | D173G |
| pYY-1617 | V93A, F119I |
| pYY-1618 | D94G, A159V |
| pYY-1619 | S96G, Y136H |
| pYY-1620 | T134A, K163E |
| pYY-1621 | Q187R |
| pYY-1622 | S204G |
| pYY-1623 | S204I |
| pYY-1624 | D207G |
| pYY-1625 | P230S |
| pYY-1626 | K233M |
| pYY-1627 | K234E |
| pYY-1628 | N240S |
| pYY-1629 | K263I |
| pYY-1630 | L275Q |
| pYY-1631 | L291P |
| pYY-1632 | L301Q |
| pYY-1633 | L302Q |
| pYY-1634 | V322A |
| pYY-1635 | I170T, I211N |
| pYY-1636 | D173G, D207G |
| pYY-1637 | D173G, P230S |
| pYY-1638 | D173G, K234E |
| pYY-1639 | S204G, N240S |
| pYY-1640 | K263I, T270I |
| pYY-1641 | L301Q, V322A |
| pYY-1642 | L302Q, H328L |

TABLE 16
Cas9 mutations identified in Set 7, Cas9 guide-specific evolution
with counter selection, using a PI domain error-prone library.

| Plasmid Number | Mutation in SpCas9-MQKFRAER nickase |
|---|---|
| pYY-1643 | G1104D |
| pYY-1644 | S1106N |
| pYY-1645 | D1117N |
| pYY-1646 | A1121T |
| pYY-1647 | D1127N |
| pYY-1648 | K1129E |
| pYY-1649 | T1138I |
| pYY-1650 | V1139M |
| pYY-1651 | A1147T |
| pYY-1652 | V1160M |
| pYY-1653 | L1164Q |
| pYY-1654 | A1184T |
| pYY-1655 | E1205V |
| pYY-1656 | A1217T |
| pYY-1657 | H1241L |
| pYY-1658 | K1246E |
| pYY-1659 | D1251G |
| pYY-1660 | H1264L |
| pYY-1661 | L1266Q |
| pYY-1662 | R1279G |
| pYY-1663 | A1283D |
| pYY-1664 | K1325G |
| pYY-1665 | I1331T |
| pYY-1666 | S1338G |
| pYY-1667 | L1343Q |
| pYY-1668 | H1349Y |
| pYY-1669 | R1359W |
| pYY-1670 | I1360S |
| pYY-1671 | G1367C |
| pYY-1672 | G1367Y |
| pYY-1673 | G1378D |
| pYY-1674 | H1241L, H1264L |
| pYY-1675 | K1246E, L1266Q |
| pYY-1676 | D1251G, Y1265C |
| pYY-1677 | Y1265C, A1283D |
| pYY-1678 | D1251G, Y1265C, A1283D |
| pYY-1679 | Q190L, N202S, K209M |
| pYY-1680 | K2631, T270I, V322A |

TABLE 17
Proposed combinations of mutations in Variant
12 TadA*7.10 and SpCas9-MQKFRAER nickase.

| | | | Mutation in SpCas9-MQKFRAER |
|---|---|---|---|
| Plasmid | Derived From | Mutation in TadA | nickase |
| pYY-1800 | Var12- with | | |
| | Q1136Y + | | |
| | R1337K | | |
| pYY-1801 | Var12- with | P29Y M94R A142N | |
| | Q1136Y + | | |
| | R1337K | | |
| pYY-1802 | Var12- with | N72Y F156N H128R | |
| | Q1136Y + | | |
| | R1337K | | |
| pYY-1803 | Var12- with | N72Y F156Y H128R | |
| | Q1136Y + | | |
| | R1337K | | |
| pYY-1804 | Var12- with | P29Y M94R A142N | |
| | Q1136Y + | N72Y F156Y H128R | |
| | R1337K | | |
| pYY-1805 | Var12- with | F156Y | |
| | Q1136Y + | | |
| | R1337K | | |
| pYY-1806 | Var12- with | A109T | |
| | Q1136Y + | | |
| | R1337K | | |
| pYY-1807 | Var12- with | A109T V155S | |
| | Q1136Y + | | |
| | R1337K | | |
| pYY-1808 | Var12- with | F156Y + A109T V155S | |
| | Q1136Y + | | |
| | R1337K | | |
| pYY-1809 | Var12- with | A109T V155S + P29Y | |
| | Q1136Y + | M94R A142N | |
| | R1337K | | |
| pYY-1810 | Var12- with | A109T V155S + N72Y | |
| | Q1136Y + | F156Y H128R | |
| | R1337K | | |
| pYY-1811 | Var12- with | A109T V155S + P29Y | |
| | Q1136Y + | M94R A142N + N72Y | |
| | R1337K | F156Y H128R | |
| pYY-1812 | Var12- with | | A1283D |
| | Q1136Y + | | |
| | R1337K | | |
| pYY-1813 | Var12- with | | Y1265C A1283D |
| | Q1136Y + | | |
| | R1337K | | |
| pYY-1814 | Var12- with | | R765A |
| | Q1136Y + | | |
| | R1337K | | |
| pYY-1815 | Var12- with | | Q768A |
| | Q1136Y + | | |
| | R1337K | | |
| pYY-1816 | Var12- with | | R765A Q768A |
| | Q1136Y + | | |
| | R1337K | | |
| pYY-1817 | Var12- with | | R765A Q768A K772A K775A |
| | Q1136Y + | | |
| | R1337K | | |
| pYY-1818 | Var12- with | | H1264L |
| | Q1136Y + | | |
| | R1337K | | |
| pYY-1819 | Var12- with | | L1266Q |
| | Q1136Y + | | |
| | R1337K | | |
| pYY-1820 | Var12- with | | R1279G |
| | Q1136Y + | | |
| | R1337K | | |
| pYY-1821 | Var12- with | | S219A |
| | Q1136Y + | | |
| | R1337K | | |
| pYY-1822 | Var12- with | | R220A R221A |
| | Q1136Y + | | |
| | R1337K | | |
| pYY-1823 | Var12- with | | S219A R220A R221A |
| | Q1136Y + | | |
| | R1337K | | |
| pYY-1824 | Var12- with | | A1283D S219A |
| | Q1136Y + | | |
| | R1337K | | |
| pYY-1825 | Var12- with | | A1283D R220A R221A |
| | Q1136Y + | | |
| | R1337K | | |
| pYY-1826 | Var12- with | | A1283D S219A R220A R221A |
| | Q1136Y + | | |
| | R1337K | | |
| pYY-1827 | Var12- with | | A1283D + H1264L |
| | Q1136Y + | | |
| | R1337K | | |
| pYY-1828 | Var12- with | | A1283D + L1266Q |
| | Q1136Y + | | |
| | R1337K | | |
| pYY-1829 | Var12- with | | A1283D + R1279G |
| | Q1136Y + | | |
| | R1337K | | |
| pYY-1830 | Var12- with | | A1283D + H1264L + L1266Q |
| | Q1136Y + | | |
| | R1337K | | |
| pYY-1831 | Var12- with | | A1283D + H1264L + R1279G |
| | Q1136Y + | | |
| | R1337K | | |
| pYY-1832 | Var12- with | | A1283D + L1266Q + R1279G |
| | Q1136Y + | | |
| | R1337K | | |
| pYY-1833 | Var12- with | | A1283D + L1266Q + R1279G + |
| | Q1136Y + | | H1264L |
| | R1337K | | |
| pYY-1834 | Var12- with | | Y1265C A1283D + L1266Q + |
| | Q1136Y + | | R1279G + H1264L |
| | R1337K | | |
| pYY-1835 | Var12- with | | S219A R220A R221A + A1283D + |
| | Q1136Y + | | L1266Q + R1279G + H1264L |
| | R1337K | | |
| pYY-1836 | Var12- with | | S219A R220A R221A + Y1265C + |
| | Q1136Y + | | A1283D + L1266Q + R1279G + |
| | R1337K | | H1264L |
| pYY-1837 | Var12- with | | Y1265C A1283D + L1266Q + |
| | Q1136Y + | | R1279G + H1264L + R765A Q768A |
| | R1337K | | |
| pYY-1838 | Var12- with | | S219A R220A R221A + Y1265C + |
| | Q1136Y + | | A1283D + L1266Q + R1279G + |
| | R1337K | | H1264L + R765A Q768A |
| pYY-1839 | Var12- with | | A1283D + S219A R220A R221A |
| | Q1136Y + | | E1250K |
| | R1337K | | |
| pYY-1840 | Var12- with | | E1250K |
| | Q1136Y + | | |
| | R1337K | | |
| pYY-1841 | Var12- with | F84Y | |
| | Q1136Y + | | |
| | R1337K | | |
| pYY-1842 | Var12- with | F84Y A109T | |
| | Q1136Y + | | |
| | R1337K | | |
| pYY-1843 | Var12- with | | R765D |
| | Q1136Y + | | |
| | R1337K | | |
| pYY-1844 | Var12- with | | R765D Q768D |
| | Q1136Y + | | |
| | R1337K | | |
| pYY-1845 | Var12- with | | R765A + R220A R221A |
| | Q1136Y + | | |
| | R1337K | | |
| pYY-1846 | Var12- with | | R765A Q768A + R220A R221A |
| | Q1136Y + | | |
| | R1337K | | |
| pYY-1847 | Q1136Y | | A1283D |
| | R1337K | | |
| pYY-1848 | Q1136Y | | A1283D+ E1250K |
| | R1337K | | |
| pYY-1849 | Q1136Y | | M1135L + A1283D |
| | R1337K | | |
| pYY-1850 | Q1136Y | | M1135L + E1250K |
| | R1337K | | |
| pYY-1851 | Q1136Y | | M1135L + A1283D + E1250K |
| | R1337K | | |
| pYY-1852 | R1337K | | A1283D |
| pYY-1853 | R1337K | | A1283D + E1250K |
| pYY-1854 | R1337K | | M1135L + A1283D |
| pYY-1855 | R1337K | | M1135L + E1250K |
| pYY-1856 | R1337K | | M1135L + A1283D + E1250K |
| pYY-1857 | Q1136Y | | A1283D + E1250K |
| pYY-1858 | Q1136Y | | A1283D + H1264L + E1250K |
| | R1337K | | |
| pYY-1859 | Q1136Y | | A1283D + L1266Q + E1250K |
| | R1337K | | |
| pYY-1860 | R1337K | | A1283D + H1264L + E1250K |
| pYY-1861 | R1337K | | A1283D + L1266Q + E1250K |
| pYY-1862 | Q1136Y | | A1283D + H1264L + E1250K + |
| | R1337K | | M1135L |
| pYY-1863 | Q1136Y | | A1283D + L1266Q + E1250K + |
| | R1337K | | M1135L |
| pYY-1864 | Q1136Y | | A1283D + H1264L + L1266Q + |
| | R1337K | | E1250K |
| pYY-1865 | Q1136Y | | A1283D + H1264L + L1266Q + |
| | R1337K | | E1250K + M1135L |
| pYY-1866 | KGPKPKKEESEK | | M1135L + A1283D + Q1136Y |
| | | | R1337K |
| pYY-1867 | KGPKPKKEESEK + | | M1135L + A1283D + Q1136Y |
| | R220A R221A | | R1337K |
| pYY-1868 | R765A Q768A | | M1135L + A1283D + Q1136Y |
| | | | R1337K |
| pYY-1869 | R765AQ768A | | M1135L + A1283D + Q1136Y |
| | K772AK775A | | R1337K |
| pYY-1870 | S219A | | M1135L + A1283D + Q1136Y |
| | | | R1337K |
| pYY-1871 | R220A R221A | | M1135L + A1283D + Q1136Y |
| | | | R1337K |
| pYY-1872 | KGPKPKKEESEK | | M1135L + A1283D + E1250K + |
| | | | R1337K |
| pYY-1873 | KGPKPKKEESEK + | | M1135L + A1283D + E1250K + |
| | R220A R221A | | R1337K |
| pYY-1874 | R765A Q768A | | M1135L + A1283D + E1250K + |
| | | | R1337K |
| pYY-1875 | R765AQ768A | | M1135L + A1283D + E1250K + |
| | K772AK775A | | R1337K |
| pYY-1876 | S219A | | M1135L + A1283D + E1250K + |
| | | | R1337K |
| pYY-1877 | R220A R221A | | M1135L + A1283D + E1250K + |
| | | | R1337K |
| pYY-1878 | KGPKPKKEESEK | | A1283D + E1250K + Q1336Y |
| pYY-1879 | KGPKPKKEESEK + | | A1283D + E1250K + Q1336Y |
| | R220A R221A | | |
| pYY-1880 | R765A Q768A | | A1283D + E1250K + Q1336Y |
| pYY-1881 | R765AQ768A | | A1283D + E1250K + Q1336Y |
| | K772AK775A | | |
| pYY-1882 | S219A | | A1283D + E1250K + Q1336Y |
| pYY-1883 | R220A R221A | | A1283D + E1250K + Q1336Y |

### Example 2: Assessment of ABEs

[0453] Novel ABE Variants A-K, which are summarized in Table 18, were tested to determine whether they had improved properties, including (1) decreased guide-dependent off target sites, (2) increased on target editing, and (3) similar or decreased bystander editing. Such improved editors could be used for treating A1AT. Variants A-K were compared to ABE Variant 12 as a control. Editors having decreased guide-dependent off target sites may lower risk of biological impact from guide-dependent off target edits. Further, increased on target editing could increase the therapeutic benefit, decrease the risk of off target edits, and potentially be used at a lower dose.

TABLE 18
A summary of ABE Variants A-K.

| | | SpCas9- | | |
|---|---|---|---|---|
| | | MQKFRAER | | SEQ |
| | ABE | nickcase | | ID |
| Plasmid | Variant | mutant | Linker | NO |
| pMSP1115 | Variant | R1337K | SGGSSGGSSGSET | 357 |
| | A | | PGTSESATPESSG | |
| | | | GSSGGS | |
| pMSP1116 | Variant | Q1136Y, | SGGSSGGSSGSET | 357 |
| | B | and | PGTSESATPESSG | |
| | | R1337K | GSSGGS | |
| pMSP1130 | Variant | M1135L, | EGGSEEEEESGS | 542 |
| | C | Q1136Y, | | |
| | | and | | |
| | | R1337K | | |
| pMSP1131 | Variant | Q1136Y, | EGGSEEEEESGS | 542 |
| | D | and | | |
| | | R1337K | | |
| pMSP1132 | Variant | M1135L, | KGPKPKKEESEK | 439 |
| | E | Q1136Y, | | |
| | | and | | |
| | | R1337K | | |
| pMSP1160 | Variant | M1135L, | SGGSSGGSSGSET | 357 |
| | F | A1283D, | PGTSESATPESSG | |
| | | Q1136Y, | GSSGGS | |
| | | and | | |
| | | R1337K | | |
| pMSP1167 | Variant | M1135L, | SGGSSGGSSGSET | 357 |
| | G | A1283D, | PGTSESATPESSG | |
| | | E1250K, | GSSGGS | |
| | | and | | |
| | | R1337K | | |
| pMSP1168 | Variant | A1283D, | SGGSSGGSSGSET | 357 |
| | H | E1250K, | PGTSESATPESSG | |
| | | and | GSSGGS | |
| | | Q1136Y | | |
| pMSP1177 | Variant | M1135L, | KGPKPKKEESEK | 439 |
| | I | A1283D, | | |
| | | Q1136Y, | | |
| | | and | | |
| | | R1337K | | |
| pMSP1179 | Variant | M1135L, | SGGSSGGSSGSET | 357 |
| | J | A1283D, | PGTSESATPESSG | |
| | | Q1136Y, | GSSGGS | |
| | | R1337K, | | |
| | | R765A, | | |
| | | and | | |
| | | Q768A | | |
| pMSP1188 | Variant | A1283D, | KGPKPKKEESEK | 439 |
| | K | E1250K, | | |
| | | and | | |
| | | Q1136Y | | |

[0454] Hundreds of editor variants identified by the various screens and structure-based approaches were tested in patient fibroblasts for on-target editing. Guide-dependent off target editing at candidate OT sites and guide-independent off target editing using the sensitive R-loop assay were also performed in patient fibroblasts. Best performing editors were tested at a sub-saturating dose of 0.25 mpk against Variant 12 codon optimized in vivo in two studies (SBTx760 and SBTx850) performed in NSG-PiZ mice (a widely accepted model of AATD). Several editors were advanced into rhAmp-seq guide-dependent off-target editing in primary hepatocytes. These experiments identified new therapeutic A1AT candidates, including Variants A-K.

[0455] Patient fibroblasts that carry the PiZ mutation were electroporated with mRNA encoding editor variants and gRNA856 to assess on-target correction editing and off-target editing at a candidate site (OT454) using amplicon sequencing (FIG. 17). Multiple new editors demonstrated improvement in on-target editing and decreased on/off-target editing ratio. Patient fibroblasts that carry the PiZ mutation were electroporated with mRNAs encoding 11 editor variants and gRNA856 to assess guide-dependent off-target editing at 6 candidate OT sites using amplicon sequencing. All editor variants tested had average OT editing lower than that observed for codon optimized Variant (FIG. 18). Eleven editor variants and guide RNA 856 were tested alongside codon optimized Var12 in vivo in NSG-PiZ mice at a sub-saturating dose of 0.25 mpk. Liver editing was assessed using NGS. Multiple new editors demonstrate improved on-target editing relative to codon optimized Variant 12 (FIG. 19). Further, in the in vivo experiments, improved liver editing corresponded to increases in the biomarker, serum A1AT (FIG. 20A) and (FIG. 20B). A subset of new editor variants shows a decrease in number of OT sites relative to codon optimized Variant 12. Variant G shows improvement across most criteria including improved in vivo on-target editing, similar bystander editing and lower number of guide-dependent OT sites (FIG. 21). ABE Variant G exhibits improved efficacy in NSG-PiZ mice. In mice, 11% editing and 3.2-fold change in AAT at 0.25 mg/kg was achieved. It is expected to achieve ˜20% editing at 0.5 mpk (FIG. 22).

[0456] Selected ABE variants were tested to compare on target and off target editing. Patient derived fibroblast cells (PiZZ cells) were transfected with mRNA encoding for indicated variants and synthetic guides using lipofectamine messengerMax. To calculate the in trans score, the editing efficiencies at 6 sites in an R-loop assay were used; to calculate the OT score, editing efficiencies at 6 A1 OT sites were used; to calculate on-target score, the on-target editing at A1 target site was used. All editing efficiencies were normalized to a parent base editor (which is Variant 12). The results of the analysis are shown in Table 19.

TABLE 19
Comparison of on-target and off-target editing for ABE Variants.

| | | | | | rank- | | rank- | Ranking | overall |
|---|---|---|---|---|---|---|---|---|---|
| | | | | on- | ing | rank- | ing | (on- | ranking |
| | Mutant/ | intrans | OT | target | (in- | ing | (on | target | (ad- |
| Plasmid | linker | score | score | score | trans) | (OT) | target) | adjusted) | justed) |
| ABE7.1 | | 10 | | | | | | | |
| 0 | | | | | | | | | |
| MRNA | Var12 | 1 | 1 | 1 | 7 | 14 | 5 | 6 | 13 |
| 2909 | | | | | | | | | |
| MRNA | R1337K | 1.2 | 1.6 | 1.08 | 6 | 12 | 2 | 4 | 6 |
| 2118 | | | | | | | | | |
| MRNA | R1337K | 1.8 | 3.1 | 1.01 | 4 | 9 | 4 | 5 | 2 |
| 2119 | Q1136Y | | | | | | | | |
| MRNA | M1135L | 2.7 | 6 | 0.86 | 3 | 7 | 12 | 12 | 6 |
| 2898 | R1337K | | | | | | | | |
| | Q1136Y + | | | | | | | | |
| | EGGSEEEEES | | | | | | | | |
| | GGS | | | | | | | | |
| MRNA | R1337K | 3.2 | 4.1 | 0.89 | 1 | 8 | 11 | 11 | 3 |
| 2899 | Q1136Y + | | | | | | | | |
| | EGGSEEEEES | | | | | | | | |
| | GGS | | | | | | | | |
| MRNA | M1135L | 3 | 2.3 | 0.97 | 2 | 10 | 9 (?) | 3 | 1 |
| 2900 | R1337K | | | | | | | | |
| | Q1136Y + | | | | | | | | |
| | KGPKPKKEE | | | | | | | | |
| | SEK | | | | | | | | |
| MRNA | M1135L + | 0.7 | 9.3 | 1 | 10 | 3 | 6 | 7 | 3 |
| 3187 | A1283D + | | | | | | | | |
| | Q1136Y | | | | | | | | |
| | R1337K | | | | | | | | |
| MRNA | M1135L + | 0.5 | 7.3 | 1 | 12 | 5 | 7 | 8 | 10 |
| 3194 | A1283D + | | | | | | | | |
| | E1250K + | | | | | | | | |
| | R1337K | | | | | | | | |
| MRNA | A1283D + | 0.5 | 1.9 | 1.1 | 13 | 11 | 1 | 2 | 11 |
| 3195 | E1250K + | | | | | | | | |
| | Q1136Y | | | | | | | | |
| MRNA | 3187 + | 1.4 | 6.4 | 0.98 | 5 | 6 | 8 | 9 | 3 |
| 3288 | KGPKPKKEE | | | | | | | | |
| | SEK | | | | | | | | |
| MRNA | 3187 + | 0.7 | 8.7 | 0.93 | 9 | 4 | 10 | 10 | 9 |
| 3290 | R765A | | | | | | | | |
| | Q768A | | | | | | | | |
| MRNA | 3187 + | 0.6 | 17.6 | 0.83 | 11 | 1 | 14 | 14 | 12 |
| 3291 | R765AQ768A | | | | | | | | |
| | K772AK775A | | | | | | | | |
| MRNA | 3194 + | 0.3 | 11 | 0.85 | 14 | 2 | 13 | 13 | 14 |
| 3296 | R765AQ768A | | | | | | | | |
| | K772AK775A | | | | | | | | |
| MRNA | 3195 + | 0.9 | 1.2 | 1.04 | 8 | 13 | 3 (?) | 1 | 6 |
| 3299 | KGPKPKKEE | | | | | | | | |
| | SEK | | | | | | | | |

### Example 3: In Vivo Correction of the PiZ Mutation in an AATD Mouse Model

[0457] Experiments were undertaken to demonstrate that a base editor system administered to AATD mice using lipid nanoparticles containing an mRNA molecule encoding the base editor ABE Variant G and the guide polynucleotide gRNA856 can be used to correct the PiZ mutation in the mice. AATD mice are also referred to as NSG-PiZ mice, are a model of alpha-1 antitrypsin deficiency, and carry greater than 10 copies of the human SERPINA1 allele PiZ. The mice were administered the base editor system intravenously as shown in FIG. 25A. The lipid nanoparticles containing the base editor system were administered intravenously and measurements were taken one week following the administration. Saturation of corrective base editing was observed at a dose of 0.75 mg/kg total RNA (1:1 mass ratio of the guide polynucleotide gRNA856 and mRNA encoding Variant G), which corresponded to a maximum percent A to G editing of about 50% (FIG. 25B). The base editing was accompanied by a corresponding increase in circulating total corrected (i.e., no longer PiZ AAT) alpha-1 antitrypsin protein (AAT) and decreased levels of PiZ AAT (FIG. 26A), as determined using liquid chromatography-mass spectroscopy (LC-MS) of serum collected from the AATD mice. At doses of 0.25 mg/kg total RNA or higher, more than half the circulating AAT was comprised of corrected AAT rather than PiZ AAT (FIG. 26B). The increase in serum levels of corrected AAT corresponded to increased levels of functional AAT in the serum (FIGS. 27A and 27B). The corrected AAT that was secreted into serum from edited hepatocytes was able to inhibit human neutrophil elastase activity. Therefore, the corrected AAT polypeptides encoded by the base edited PiZ SERPINA1 alleles in the mice were functional. Functional AAT is an important pre-clinical biomarker. Correction of the PiZ mutation also led to decreased liver Z-AAT polymers in the mice (FIGS. 33A-33C and 38).

[0458] To demonstrate durability of corrective editing in the liver of the mice, parallel cohorts of AATD mice were administered lipid nanoparticles containing mRNA encoding the base editor Variant T and the guide polynucleotide gRNA856 at a dose of 0.25 mg/kg total RNA (1:1 mass ratio of the guide polynucleotide gRNA856 and mRNA encoding Variant G). Maximum percent A to G base editing of the SERPINA1 gene was then measured at one week and at three months in the mice. Livers collected from the mice were analyzed for corrective editing of the PiZ allele of the SERPINA1 gene (FIG. 28) using next-generation sequencing. Maximum percent A to G editing of about 20% was observed at one week post-administration, and this increased to about 40% at three months post-administration. Not intending to be bound by theory, this increase in correction may be the result of a survival and/or proliferative advantage that edited hepatocytes expressing a corrected AAT protein have relative to hepatocytes that still express Z-AAT from a PiZ SERPINA1 gene allele, which is hepatotoxic. A proliferative advantage of hepatocytes expressing a corrected AAT protein relative to hepatocytes expressing Z-AAT has been demonstrated previously in the AATD mouse model.

[0459] Base editing in the AAT mice, as described above, resulted in the creation of a number of SERPINA1 mutants in the mice (FIG. 34A). Measurements confirmed that the A5+A7 mutant of the SERPINA1 PiZ allele encoded a functional AAT protein having a D365G alteration (FIGS. 34B, 35, and 36). The AAT protein having the D365G alteration was secreted comparably to wild-type ATT encoded by the PiM allele of SERPINA1 (FIG. 34B), functioned in neutrophil elastase inhibition similarly to wild-type ATT (FIG. 35), and increased levels of expression of the AAT protein having the D365G alteration was directly correlated with increases in functional AAT in the mice (FIG. 36).

[0460] An experiment was undertaken to demonstrate that a second administration of the base editor system at two weeks following the first administration led to an increase in maximum percent A to G editing of the PiZ SERPINA1 gene allele in the mice (FIGS. 37A and 37B). As shown by comparing FIG. 37B to FIG. 25B, a second dose of the base editor system was associated with increased levels of base editing in the mice.

### Example 4: In Vivo Correction of the PiZ Mutation in a Humanized PiZ Rat Model

[0461] A humanized rat model of alpha-1 antitrypsin deficiency associated with the PiZ allele of SERPINA1 (hSERPINA1 PiZ rats) was prepared and in vivo correction of the PiZ allele using a base editor system containing the guide polynucleotide gRNA856 and mRNA encoding the base editor ABE Variant G was evaluated.

[0462] The hSERPINA1 PiZ rats were prepared as shown in FIG. 29A. The hSERPINA1 PiZ rats were prepared by inserting the human SERPINA1 PiZ allele coding sequence followed by a SV40-pA sequence (a poly(A) tail) immediately 3′ of the endogenous Serpina1 ATG codon in Sprague-Dawley rats. The insertion interrupted expression of the rat Serpina1 gene and replaced it with the SERPINA1 PiZ allele under the control of the endogenous Serpina1 gene promoter in the rats. Knock-out of the rat gene and knock-in of the human PiZ gene was confirmed by sequencing of genomic DNA collected from two founder colonies of the hSERPINA1 PiZ rats. As shown in FIG. 29B, liquid chromatography-coupled mass spectrometry (LC-MS) of serum samples from the hSERPINA1 PiZ rats confirmed that rats homozygous for the human SERPINA1 PiZ allele no longer expressed rat AAT and only expressed human Z-AAT (which is the protein expressed from the SERPINA1 PiZ alleles) (about 3.5 μM at 18 weeks). The hSERPINA1 PiZ rats may develop both liver and lung phenotypes of alpha-1 antitrypsin deficiency. The hSERPINA1 PiZ rats also represents an immunocompetent rodent model that expresses the mutant Z-AAT protein and can be used in pharmacological or toxicological studies to complement the NSG-PiZ mouse model, which has liver pathology but no immune system.

[0463] To evaluate in vivo base editing in the rats, the hSERPINA1 PiZ rats were administered the base editor system intravenously as shown in FIG. 30A. The lipid nanoparticles containing the base editor system were administered intravenously and measurements were taken one week following the administration. No saturation of corrective base editing was observed at the doses of total RNA evaluated (1:1 mass ratio of the guide polynucleotide gRNA856 and mRNA encoding Variant G) (FIG. 30B). A maximum percent A to G editing of about 50% (FIG. 30B) was observed at a total RNA dose of 3 mg/kg. The base editing was accompanied by a corresponding increase in circulating total corrected (i.e., no longer PiZ AAT) alpha-1 antitrypsin protein (AAT) and decreased levels of PiZ AAT (FIG. 31A), as determined using liquid chromatography-mass spectroscopy (LC-MS) of serum collected from the AATD mice. At doses of 0.5 mg/kg total RNA or higher, more than half the circulating AAT was comprised of corrected AAT rather than PiZ AAT (FIG. 31B). Therefore, as demonstrated above, base editing can be used to correct a PiZ mutation in vivo to restore SERPINA1 gene function, thereby decreasing Z-AAT polymers in the liver, and increasing functional AAT and decreasing Z-AAT in two rodent models (FIG. 32).

### Example 5: PiM+Bystander was Secreted Comparably to PiM Alpha-1 Antitrypsin (AAT) Protein In Vivo

[0464] To complete a dose response study for lipid nanoparticles containing the guide RNA gRNA856 and mRNA encoding the base editor ABE Variant G (the “Variant G Formulation”), NSG-PiZ mice were administered a single dose of the Variant G Formulation at increasing dose levels. One-week after dosing, livers were collected to assess correction editing using next-generation sequencing NGS and serum to measure circulating AAT proteins by LC-MS (FIG. 39).

[0465] The PiZ mutation in AAT results in aggregation of Z-AAT in hepatocytes, which in turn leads to decreased levels of circulating AAT in serum. Correction of the PiZ mutation using the Variant G Formulations results in increased expression of corrected AAT with a corresponding decrease in Z-AAT. The two proteoforms that constitute corrected AAT are PiM (wildtype) AAT and PiM+Bystander (D365G) AAT, which correspond to precise correction (7G target nucleotide only) and concurrent editing of the target nucleotide and a neighboring bystander adenine (7G+5G), where the 5G position corresponds to that of the A underlined in the following sequence and the 7G position corresponds to that of the boldface A in the following nucleotide sequence: ATCGACAAGAAAGGGACTGAAGCTGCTG, (SEQ ID NO: 593).

[0466] To assess if the PiM+Bystander protein was secreted from hepatocytes comparably to the PiM protein, the levels of each protein in serum (y-axis) was plotted against their respective allelic frequencies in the liver. If the PiM+Bystander protein was not secreted from hepatocytes as well as the PiM protein, there would have been less protein in the serum per % 7G+5G editing as compared to PiM protein per % 7G editing. However, the data indicated good correlation of both proteins being secreted to serum relative to their respective allelic frequencies, which suggested that both were secreted form the liver similarly.

### Example 6: PiM+Bystander Alpha-1 Antitrypsin (AAT) Protein was Active and Functionally Indistinguishable from PiM (WI) AAT In Vitro and Ex Vivo

[0467] Bacterially expressed PiM and PiM+Bystander (D365G) proteins were tested in vitro for their ability to bind to or inhibit human neutrophil elastase (HNE). Both proteins demonstrated equivalent binding to elastase (FIG. 40A) and inhibition of elastase activity (FIG. 40B) in vitro.

[0468] In addition to the in vitro assays, sera from mice dosed once with lipid nanoparticles containing the guide RNA gRNA856 and mRNA encoding the base editor ABE Variant G (the “Variant G Formulation”) were tested in an ex vivo assay for their ability to inhibit HNE activity. An LC-MS assay performed on the same sera demonstrated that PiM+bystander (D365G) was the predominant form of AAT in mice administered a 2 mpk dose of the Variant G Formulation, while PiM and PiM+Bystander (D365G) AAT were present in relative equal amounts in mice administered a 0.25 mpk dose of the Variant G Formulation(stacked bars of FIG. 40C). Regardless of the ratio of PiM AAT to PiM+Bystander AAT, these sera showed a dose-dependent increase in inhibition of HNE activity that was represented as Functional AAT (dots in FIG. 40C). These in vitro and ex vivo data suggested a functional equivalence of PiM and PiM+Bystander AAT in their ability to bind and inhibit HNE.

### Example 7: Hepatocytes that Expressed PiM+Bystander AAT Demonstrated a Survival Advantage in NSG-PiZ Mice

[0469] NSG-PiZ mice were administered a single dose of 0.25 mpk of the Variant G Formulation and liver editing was evaluated at week 1 and week 13 post-dose. Next gen sequencing results demonstrated that hepatocytes carrying either the precise correction (7G) or the precise correction paired with the bystander edit (7G+5G) both demonstrated a survival advantage relative to hepatocytes that remained uncorrected. This was evident from the increased editing efficiency observed at week 13 relative to week 1 for PiM and PiM+Bystander alleles but not for PiZ+Bystander alleles (FIG. 41A). The sequencing data were supported by serum LC-MS measurements (FIG. 41B), which confirmed increases in circulating PiM and PiM+Bystander protein levels secreted from hepatocytes carrying the corresponding correction edits at week 13 post-dose when compared to week 1. These data suggested that expression of PiM+Bystander AAT was not detrimental to hepatocyte health and provided a survival advantage similar to PiM (wild type) AAT.

### Example 8: Increased Liver Editing in PiZ-Rat with the Variant G Formulation Redose

[0470] PiZ rats were dosed with a single or double dose (i.e., two separate doses) of the Variant G Formulation at 0.25 mpk or 0.5 mpk. The second dose was delivered 2-weeks after the first dose and the final/terminal takedown was 14 days after the second dose of the Variant G Formulation. A control group was also evaluated, which only received a single dose of 1 mpk of the Variant G Formulation. Next-generation sequencing (NGS) results indicated that repeat dosing increased correction editing relative to a single dose (FIG. 42). Furthermore, two Variant G Formulation doses of 0.5 mpk resulted in the same level of correction editing as a single dose of 1 mpk. Repeat dosing may be used to avoid LNP-associated toxicity observed at higher doses while still achieving optimal correction editing.

### Example 9: Durable Liver Editing and Biomarker Changes in PiZ Rats

[0471] PiZ rat next-generation sequencing (NGS) data (FIG. 43A) demonstrated durable correction editing in PiZ rats 1 week or 14 weeks after being administered a single 0.5 mpk dose of the Variant G Formulation. Liquid chromatography-mass spectrometry (LC-MS) measurements of serum collected from these rats at week 1, week 4, and week 14 (FIG. 43B) demonstrated that the liver correction editing corresponded to a sustained increase in circulating corrected AAT accompanied by a decrease in PiZ AAT. This data confirmed durable editing in a second rodent species after Variant G Formulation-mediated base editing.

### Example 10: Decrease in Liver Z-AAT in PiZ Rats One-Week after Dosing with the Variant G Formulation

[0472] Livers from PiZ rats administered the Variant G Formulation in a dose response study where rats were given increasing dose levels of the Variant G Formulation, and livers from a durability study where rats were administered 0.5 mpk of the Variant G Formulation were evaluated by liquid chromatography-mass spectrometry (LC-MS) for protein levels of mutant Z-AAT. A dose responsive (FIG. 44A) decrease after 1 week of a single dose of Variant G Formulation was observed in PiZ rat livers. This decrease in liver Z-AAT was still observed (i.e., durable) as of 14 weeks after a single dose of the Variant G Formulation (FIG. 44B).

### Example 11: Improved Liver Editing in a PiZ Rat Model Dosed with the Variant G Formulation

[0473] PiZ rats were administered the Variant G Formulation at doses of 0.25 mpk and 0.5 mpk. The rats were taken down 1-week post dose, and livers were collected to assess correction editing using next-generation sequencing (NGS). Improved liver editing was observed using the Variant G Formulation as compared to a formulation similar to the Variant G Formulation but prepared using lipid nanoparticles having a lipid composition that was different from that of the Variant G Formulation (FIG. 45).

### Example 12: Variant G Formulation

[0474] Experiments were undertaken to further characterize the lipid nanoparticle (LNP) formulation containing an mRNA that encodes a Variant G Adenosine Base Editor protein (SEQ ID NO: 557) and a gRNA (gRNA856; SEQ ID NO: 575) that targets the SERPINA1 g.1096G>A. This LNP formulation is referred to as “Variant G Formulation” throughout the present disclosure. In-vivo pharmacology studies were conducted to evaluate the base-editing correction of the SERPINA1-g.1096G>A allele (as measured by the relative frequency of on-target base-edited, corrected SERPINA1 alleles corresponding to PiM and PiM+Bystander alleles) and corresponding changes in clinically relevant biomarkers (human AAT and functional AAT in serum), both at 1 week after a single IV administration of the Variant G Formulation at a dose ranging from 0.05 to 2.0 mg/kg in NSG-PiZ mice or 0.10 to 3.0 mg/kg in PiZ rats, and up to approximately 3 months after a single IV administration of the Variant G Formulation at 0.25 mg/kg in NSG-PiZ mice or 0.50 mg/kg in PiZ rats. Dose-dependent increases in corrected SERPINA1 alleles were observed in both rodent models, with highest observed frequencies of 46% in NSG-PiZ mice at a total RNA dose of 0.75 mg/kg and 57% in PiZ rats at a total RNA dose of 3.0 mg/kg. A dose-dependent decrease in the abundance of pathologic PiZ alpha-1 antitrypsin (AAT) variants in liver was observed 1 week after administration of the Variant G Formulation, achieving up to 82% reduction at a dose level of 1 mg/kg in PiZ rats; the NSG-PiZ mouse may not be a suitable model for evaluation of this particular endpoint due to the constitutively high accumulation of human PiZ AAT in the liver (driven by the multicopy SERPINA1c.1096G>A transgene) and high individual variability in hepatic PiZ AAT burden. In addition, a dose-dependent increase in total human AAT in serum (up to 4.1-fold change from baseline in NSG-PiZ mice and up to 2.6-fold change from baseline in PiZ rats), concomitant with a dose-dependent decrease in the levels of pathogenic PiZ AAT variants (relative to total AAT) in serum was observed in both rodent models 1 week after administration of the Variant G Formulation, the lowest levels (2%) of residual PiZ AAT (relative to total AAT) were observed at a total RNA dose of 2.0 mg/kg in NSG-PiZ mice and at a total RNA dose of 3.0 mg/kg in PiZ rats. The durability of base editing in liver and corresponding biomarker changes after the administration of a single dose of the Variant G Formulation at 0.25 mg/kg in NSG-PiZ mice and 0.50 mg/kg in PiZ rats was confirmed in both rodent models to be sustained for at least approximately 3 months.

### Pharmacodynamics

[0475] Pharmacodynamic studies of the Variant G Formulation were conducted in 2 rodent models of alpha-1 antitrypsin deficiency (AATD), NSG-PiZ mice and PiZ rats, to evaluate the pharmacodynamic dose response of the Variant G Formulation and the durability of response.

### The NSG-PiZ Mouse Model Used

[0476] (NOD.Cg-Prkdc^{scid} Il2rg^{tmlWjl}Tg(SERPINA1*E342K) #Slcw/SzJ mouse; RRID:IMSR_JAX:028842) was a commercially available, humanized transgenic mouse strain on the immunodeficient NSG background that carries multiple copies (>10 copies; Carlson J A, Rogers B B, Sifers R N, et al. Accumulation of PiZ alpha 1-antitrypsin causes liver damage in transgenic mice. J Clin Invest. 1989; 83(4):1183-90. DOI:10.1172/JCI113999) of the human SERPINA1-c.1096G>A allele, which encodes the pathogenic human PiZ AAT variant. The PiZ rat model used was a newly developed, humanized knock-in/knock-out rat strain (SD-Serpina1^{eml(SERPINA1*)} strain, commonly named PiZ rat) that constitutes a unique immunocompetent animal model in which a single copy of the human SERPINA1-c. 1096G>A allele is expressed under the endogenous Serpina1 promoter, resulting in the expression of the AAT-p.Glu366Lys, or PiZ, variant at levels relevant to human AATD disease. These complementary animal models of AATD enabled the characterization of the Variant G Formulation both in immunocompromised mice that overexpress the pathogenic human PiZ AAT protein and exhibit PiZ aggregates or globules in the liver (a histopathological hallmark of AATD liver disease observed in patients with AATD), and in immunocompetent rats that express the human PiZ AAT protein at physiologically relevant levels under the control of the endogenous Serpina1 promoter.

[0477] In vivo primary pharmacodynamic studies were conducted in both NSG-PiZ mice and PiZ rats to demonstrate the pharmacological activity of the Variant G Formulation up to approximately 3 months after a single IV (bolus) administration. The primary endpoints evaluated in these studies were the relative levels of on-target base-edited, corrected SERPINA1 alleles in liver and corresponding changes in potentially clinically relevant biomarkers (levels of human AAT protein in liver and serum, and levels of functional AAT in serum).

[0478] Dose-response studies were evaluated at 1 week after a single IV (bolus) administration of Variant G Formulation at doses ranging from 0.05 to 2.0 mg/kg in NSG-PiZ mice and from 0.10 to 3.0 mg/kg in PiZ rats. The duration selected for these studies represented an early time point at which the base-editing levels in the liver had nearly peaked. Noteworthy findings from these studies are described in the following paragraphs.

[0479] A dose-dependent increase in corrected SERPINA1 alleles was observed in the liver in both models. In NSG-PiZ mice, the maximum effect was observed at 0.75 mg/kg in males and at 1 mg/kg in females (mean relative frequencies of corrected SERPINA1 alleles of 46% in males, and 47% in females). In PiZ rats, the maximum effect was observed at 3.0 mg/kg (mean relative frequencies of corrected SERPINA1 alleles of 57% in males and 49% in females).

[0480] A dose-dependent decrease in the abundance of pathogenic PiZ AAT variants in liver was observed in PiZ rats; the maximum effect was observed at 1.0 mg/kg (mean decreases, relative to the vehicle control group, of 82% in males and 73% in females). The NSG-PiZ mouse was not a suitable model for the evaluation of this endpoint, due to the constitutively high accumulation of human PiZ AAT in the liver (driven by the multicopy SERPINA1c.1096G>A transgene), and high individual variability in hepatic PiZ AAT burden.

[0481] A dose-dependent increase in total human AAT in serum, concomitant with a dose-dependent decrease in the levels of pathogenic PiZ AAT variants (relative to total AAT) was observed in both models. In NSG-PiZ mice, the mean levels of PiZ AAT, relative to total AAT, were 2% at 2.0 mg/kg in males, and 3% at 1.0 mg/kg in females. In PiZ rats, the mean levels of PiZ AAT, relative to total AAT, were 2% in males and 4% in females at 3.0 mg/kg.

[0482] An increase in functional AAT in serum was observed in both models. In NSG-PiZ mice, the maximum effect was observed at the highest doses evaluated in each group (mean changes, relative to baseline, of 5.5-fold at 2.0 mg/kg in males, and 3.8-fold at 1.0 mg/kg in females). In PiZ rats, the maximum effect was observed at 2.0 and 3.0 mg/kg (median changes, relative to baseline, of 2.6-fold in males at 2.0 and 3.0 mg/kg, and 2.8-fold in females at 3.0 mg/kg).

[0483] Durability of response studies were evaluated for up to approximately 3 months after a single IV (bolus) administration of the Variant G Formulation at 0.25 mg/kg in NSG-PiZ mice and 0.50 mg/kg in PiZ rats. The doses selected for each of these studies represented the lowest doses at which potentially clinically meaningful increases in total AAT and functional AAT above baseline levels in serum, and increase in corrected AAT above 50% relative to total AAT in serum were observed in association with correction of the pathogenic SERPINA1 g.1096G>A allele in liver, in the dose-response studies. Noteworthy findings from these studies are described in the following paragraphs.

[0484] Durable base-editing correction of the SERPINA1-g.1096G>A allele in the liver was observed in both models. In NSG-PiZ mice, an increased frequency of corrected SERPINA1 alleles was observed between Weeks 1 and 13 (mean relative frequencies of corrected SERPINA1 alleles of 19% in both sexes at Week 1, and 36% in males and 43% in females at Week 13); this increase could be attributed to competitive survival advantage of hepatocytes in which wild-type AAT was expressed (Borel F, Tang Q, Gernoux G. Survival advantage of both human hepatocyte xenografts and genome-edited hepatocytes for treatment of α-1 antitrypsin deficiency. Mol Ther. 2017; 25(11):2477-2489. DOI:10.1016/j.ymthe.2017.09.020) relative to hepatocytes expressing a high burden of PiZ AAT (Lindblad D, Blomenkamp K, Teckman J. Alpha-1-antitrypsin mutant Z protein content in individual hepatocytes correlates with cell death in a mouse model. Hepatology. 2007; 46(4):1228-1235. DOI:10.1002/hep.21822). In PiZ rats, a generally sustained frequency of corrected SERPINA1 alleles was observed between Weeks 1 and 14 (mean relative frequencies of corrected SERPINA1 alleles of 42% in males and 37% in females at Week 1, and 46% in males and 27% in females at Week 14).

[0485] A durable decrease in the abundance of pathogenic PiZ AAT variants in liver was observed in both models (except for female NSG-PiZ mice). In NSG-PiZ mice, the mean decreases, relative to the vehicle control group, were 17% in males and 16% in females at Week 1, and 46% in males at Week 13. No effect of the Variant G Formulation was detectable in female mice at Week 13, due to high individual variability among female mice in the vehicle control group in this study. In PiZ rats, the mean decreases, relative to the vehicle control group, were 58% in males and 61% in females at Week 1, and 79% in males and 58% in females at Week 14.

[0486] A durable increase in total human AAT in serum, concomitant with a durable decrease in the levels of pathogenic PiZ AAT variants (relative to total AAT) in serum was observed in both models. In NSG-PiZ mice, PiZ AAT variants reached the lowest levels at the last time point evaluated (mean levels, relative to total AAT, of 12% in males and 7% in females at Week 13). In PiZ rats, the decrease in the levels of PiZ AAT variants was generally sustained between Weeks 1 and 14 (mean levels, relative to total AAT, of 20% in males and 23% in females at Week 1, and 17% in males and 32% in females at Week 14).

[0487] A durable increase in functional alpha-1 antitrypsin (AAT) in serum was observed in both models (except for female PiZ rats). In NSG-PiZ mice, the mean changes, relative to baseline, were 2.4-fold in both sexes at Week 1, and 3.8-fold in males and 3.1-fold in females at Week 13. In PiZ rats, the mean changes, relative to baseline, were 1.7-fold in both sexes at Week 1, and 1.4-fold in males at Week 14. No effect of the Variant G Formulation was detectable in female rats at Week 14, possibly due to the decrease with age in the levels of human AAT in serum that has been observed in the PiZ rat, which may have different temporal dynamics between sexes in this model.

### Dose-Response Pharmacology in NSG-PiZ Mice

[0488] The correction of the pathogenic SERPINA1 g.1096G>A allele in liver and corresponding changes in biomarkers (levels of human AAT protein in liver and serum, and levels of functional AAT in serum) were evaluated in a dose-response study in NSG-PiZ mice, 1 week after a single IV (bolus) administration of the Variant G Formulation at a total RNA dose ranging from 0.05 to 2.0 mg/kg.

[0489] A total of 54 NSG-PiZ mice (3 or 4 male or female mice per group; 8 weeks of age) were administered the Variant G Formulation as a single IV (bolus) injection (lateral tail vein) at a total RNA dose of 0.05, 0.10, 0.25, 0.50, 0.75, 1.0, or 2.0 mg/kg, or normal saline as a control. One week after administration of test or control article, liver samples were collected for evaluation of corrected SERPINA1 alleles and human AAT protein. Both 2 days prior to and 1 week after administration of test or control article, serum samples were collected for evaluation of levels of human AAT and functional AAT.

[0490] All mice survived to scheduled euthanasia.

[0491] A Variant G Formulation dose-dependent increase in corrected SERPINA1 alleles in liver was observed in male and female NSG-PiZ mice at Day 7, with maximum effect below the top dose tested. Mean relative frequencies of corrected SERPINA1 alleles ranged from 7% (at 0.10 mg/kg, the lowest dose assessed) to 46% (at 0.75 mg/kg) in males, and from 5% (at 0.05 mg/kg) to 47% (at 1.0 mg/kg) in females (FIG. 46).

[0492] No statistically significant effect of the Variant G Formulation dose was observed on the abundance of PiZ AAT in liver, possibly due to the constitutively high accumulation of PiZ AAT in the liver of NSG-PiZ mice (driven by the multicopy SERPINA1-g.1096G>A transgene) combined with high individual variability in hepatic PiZ AAT burden in this mouse model.

[0493] The Variant G Formulation dose-dependent increase in corrected SERPINA1 alleles in liver at Day 7 was associated with a dose-dependent increase in total human AAT in serum, concomitant with a dose-dependent decrease in the levels of PiZ AAT variants (relative to total AAT) in serum, in male and female NSG-PiZ mice (FIG. 47). The greatest increases in the levels of total AAT in serum were observed at Variant G Formulation total RNA doses between 0.50 and 2.0 mg/kg (mean changes of 3.1 to 3.6-fold in males and 3.7 to 4.1-fold in females, relative to baseline at Day −2). Corrected AAT variants were the predominant forms of AAT in serum at Variant G Formulation total RNA doses between 0.25 and 2.0 mg/kg (mean levels, relative to total AAT, of 77% to 98% in males and 83% to 97% in females). Pathogenic PiZ alpha-1 antitrypsin (AAT) variants reached the lowest levels in serum at the highest doses of Variant G Formulation evaluated (mean levels, relative to total AAT, of 2% at 2.0 mg/kg in males, and 3% at 1.0 mg/kg in females).

[0494] In addition, a Variant G Formulation dose-dependent increase in functional AAT in serum was observed at Day 7 in male and female NSG-PiZ mice; the greatest increases were observed at the highest doses of the Variant G Formulation evaluated (mean changes, relative to baseline at Day −2, of 5.5-fold at 2.0 mg/kg in males, and 3.8-fold at 1.0 mg/kg in females) (FIG. 48).

[0495] These results demonstrated that a single IV (bolus) administration of the Variant G Formulation to NSG-PiZ mice resulted in a dose-dependent increase in corrected SERPINA1 alleles in the liver at Day 7, which was associated with increased total human AAT protein and functional AAT in circulation, and with decreased pathogenic PiZ AAT variants in circulation.

### Durability Pharmacology NSG-PiZ Mice

[0496] The durability of correction of the pathogenic SERPINA1 g.1096G>A allele in liver, and of the corresponding changes in biomarkers (levels of human AAT protein in liver and serum, and levels of functional AAT in serum) was evaluated in NSG-PiZ mice, up to 13 weeks after a single IV (bolus) administration of the Variant G Formulation at a dose of 0.25 mg/kg.

[0497] A total of 48 NSG-PiZ mice (3 or 5 male or female mice per group; 6 to 7 weeks of age) were administered the Variant G Formulation as a single IV (bolus) injection (lateral tail vein) at a total RNA dose of 0.25 mg/kg, or normal saline as a control. At 1 and 13 weeks after administration of test or control article, liver samples were collected for evaluation of corrected SERPINA1 alleles and human AAT protein. Both 3 days prior to and at Weeks 1, 4, and 13 after administration of test or control article, serum samples were collected for evaluation of levels of human AAT and functional AAT.

[0498] All mice survived to scheduled euthanasia.

[0499] Durable base-editing correction of the SERPINA1-g.1096G>A allele in liver was observed in male and female NSG-PiZ mice after administration of the Variant G Formulation. The mean relative frequencies of corrected SERPINA1 alleles were 19% at Week 1 (males and females) and approximately 2-fold higher at Week 13 (36% in males and 43% in females) (FIG. 49). The increased frequency of corrected SERPINA1 alleles observed between Weeks 1 and 13 can likely be attributed to competitive survival advantage of hepatocytes that carried corrected SERPINA1 alleles, possibly associated with apoptosis of hepatocytes that expressed high levels of the pathogenic PiZ variant, and consistent with observations in this mouse model (Borel F, Tang Q, Gernoux G. Survival advantage of both human hepatocyte xenografts and genome-edited hepatocytes for treatment of α-1 antitrypsin deficiency. Mol Ther. 2017; 25(11):2477-2489. DOI:10.1016/j.ymthe.2017.09.020Borel, 2017; Rudnick D A, Liao Y, An J K, et al. Analyses of hepatocellular proliferation in a mouse model of alpha-1-antitrypsin deficiency. Hepatology. 2004; 39(4):1048-1055. DOI:10.1002/hep.20118 Lindblad D, Blomenkamp K, Teckman J. Alpha-1-antitrypsin mutant Z protein content in individual hepatocytes correlates with cell death in a mouse model. Hepatology. 2007; 46(4):1228-1235. DOI:10.1002/hep.21822Lindblad, 2007).

[0500] The durable increase in corrected SERPINA1 alleles in liver through Week 13 was associated with a decrease in the abundance of pathogenic PiZ AAT variants in liver at Week 1 (mean decreases, relative to the vehicle control group, of 17% in males and 16% in females) and at Week 13 after dosing (mean decrease, relative to the vehicle control group, of 46% in males). No effect of the Variant G Formulation was observed in NSG-PiZ female mice at Week 13, due to high individual variability among female mice in the vehicle control group.

[0501] In addition, the durable increase in corrected SERPINA1 alleles in liver through Week 13 was associated with a durable increase in total human AAT in serum, concomitant with a sustained decrease in the levels of PiZ AAT variants (relative to total AAT) in serum, in male and female NSG-PiZ mice administered the Variant G Formulation. The mean increases in the levels of total human AAT in serum were approximately 3—, 3.5-, and 4-fold higher at Weeks 1, 4, and 13, respectively, than at baseline (Day 3) (both sexes) (FIG. 50). Corrected AAT variants were the predominant forms of AAT in serum during the period between Weeks 1 and 13 after administration of the Variant G Formulation (mean levels, relative to total AAT, of 78% to 88% in males and 86% to 94% in females). Pathogenic PiZ AAT variants reached the lowest levels in serum at the last time point evaluated (mean levels, relative to total AAT, of 12% in males and 7% in females at Week 13).

[0502] Finally, and consistent with the increase in corrected AAT, a durable increase in functional AAT in serum was observed through Week 13 in male and female NSG-PiZ mice administered the Variant G Formulation (mean changes, relative to baseline at Day 3, of 2.4-fold [both sexes] at Week 1, and 3.8-fold [males] and 3.1-fold [females] at Week 13) (FIG. 51).

[0503] These results demonstrate that a single IV (bolus) administration of Variant G Formulation to NSG-PiZ mice at a dose of 0.25 mg/kg resulted in a durable increase in corrected SERPINA1 alleles in the liver through Week 13, which was associated with a durable increase in total human AAT protein and functional AAT in circulation, and durable decrease of pathogenic PiZ AAT variants in circulation.

### Humanized PiZ Knock-In Rat Model of AATD

[0504] Experiments were undertaken to generate a rat strain in which expression of the rat AAT protein was replaced with expression of the human AAT-p.Glu366Lys, or PiZ, variant under the control of the endogenous Serpina1 promoter (SD-Serpina1^{eml(SERPINA1*)} referred to as PiZ rat), and to assess the phenotype of this model up to 1 year of age.

[0505] A human SERPINA1-c.1096G>A full-length cDNA, which encodes the AAT-p.Glu366Lys, or PiZ, variant, was inserted using CRISPR/Cas9 technology at the location of the translation initiation codon of the endogenous Serpina1 gene in Sprague Dawley outbred rat embryos, resulting in disruption of the rat Serpina1 gene due to introduction of a poly(A) signal sequence upstream of the remainder of the Serpina1 gene. Founder rats were identified by PCR assay and were confirmed by Sanger sequencing to carry an error-free SERPINA1-c.1096G>A sequence inserted at the target site in the endogenous Serpina1 locus. In homozygous mutant PiZ rats derived from the confirmed founders, the SERPINA1-c.1096G>A copy number was estimated to be 2 copies per genome, confirming the absence of random integration of the SERPINA1-c.1096G>A cDNA in the rat genome.

[0506] Validation of the PiZ rat strain at the protein level was conducted by assessment of rat and human AAT in serum through a combination of approaches. Western blot confirmed the absence of rat AAT protein in the serum from homozygous mutant PiZ rats. Meso Scale Discovery immunoassay confirmed the presence of antigenic levels of human AAT protein in the serum of heterozygous and homozygous mutant PiZ rats. Relative quantification of rat and human AAT, through an LC-MS peptide mapping assay that tracked panels of peptides specific for each of the 2 AAT orthologs, showed loss of endogenous rat AAT in the serum of homozygous mutant PiZ rats, and emergence of human AAT in heterozygous and homozygous mutant PiZ rats. As expected based on the sequence of the knock-in cDNA, only peptides corresponding to the human PiZ AAT variant, and not wild-type human AAT, were detected in the serum of heterozygous and homozygous mutant PiZ rats by LC-MS peptide mapping.

[0507] The phenotypic effect of expressing the human PiZ AAT variant was evaluated in cohorts of homozygous PiZ rats (2 independent founder lines, Lines 18428 and 18574) compared to age matched Sprague Dawley rats. A total of 27 PiZ Line 18428, 32 PiZ Line 18574, and 28 Sprague Dawley rats (5 to 10 male rats and 6 to 10 female rats per study group) were aged to 6 months (Week 26) or 1 year (Week 52); levels of human PiZ AAT protein and of the liver damage marker ALT were measured in serum longitudinally (between Weeks 16 and 52). In addition, microscopic evaluation of the liver (PAS-D and H&E stains) was conducted at Weeks 26 and 52.

[0508] All PiZ rats appeared healthy throughout the study and had a normal lifespan. As expected, circulating human PiZ AAT protein was only detected in PiZ rats, with mean (SD) levels that ranged, across study groups, from 537 (80) to 973 (122) μg/mL at Week 26 (FIG. 52). This was consistent with the levels of AAT observed in serum from patients with Pi*ZZ genotype, which are rarely above 570 μg/mL (Franciosi N A, Fraughen D, Carroll T P, et al. Alpha-1 antitrypsin deficiency: clarifying the role of the putative protective threshold. Eur Respir J. 2022; 59(2):2101410. DOI:10.1183/13993003.01410-2021). Longitudinal assessment of human PiZ AAT in the serum of PiZ rat cohorts aged to 1 year showed statistically significant effects of age and sex in both founder lines (FIG. 53). Increasing age was associated with decreased levels of PiZ AAT in serum; the mean decrease at Week 52 relative to Week 16 ranged between 32% in female rats (Line 18574) and 57% in male rats (Line 18428). Male sex was associated with higher levels of PiZ AAT in serum; the mean relative differences (male vs female) ranged between 1.6 and 2.3-fold (Line 18428), and 1.3- and 1.7-fold (Line 18574).

[0509] Longitudinal assessment of the liver damage marker ALT (Week 16 to Week 52) showed a statistically significant increase in the levels of ALT in serum with age in both Sprague Dawley and PiZ rats; no statistically significant differences between Sprague Dawley and PiZ rats (both founder lines) or between sexes were observed. In humans, only 7.8% of individuals with Pi*ZZ phenotype (n=638) have been found to have abnormally increased levels of ALT in serum, which did not differ significantly from healthy controls (Pi*MM phenotype; n=152) (Clark V C, Dhanasekaran R, Brantly M, et al. Liver test results do not identify liver disease in adults with α-1 antitrypsin deficiency. Clin Gastroenterol Hepatol. 2012; 10(11):1278-1283. DOI:10.1016/j.cgh.2012.07.007).

[0510] Microscopic examination of the liver showed that PiZ rats did not exhibit PAS-D-stained globules (Week 52) but did have an increased incidence and severity of clear vacuoles in the midzonal region of the liver compared to wild-type control rats (12 of 12 PiZ rats compared to 3 of 12 Sprague Dawley rats at Week 26, and 11 of 15 PiZ rats compared to 3 of 14 Sprague Dawley rats at Week 52/53). There was a single, 52-week-old female PiZ rat with oval cell hyperplasia, hepatocellular anisokaryosis, multinucleated hepatocytes, and Kupffer cell pigmentation, which was not a background finding in wild-type rats of this strain and age. In humans, liver disease is found in only 10% of adult individuals with Pi*ZZ phenotype (n=1595), with a mean (SD) age at the onset of the disease of 61 (15) years (Tanash H A, Piitulainen E. Liver disease in adults with severe alpha-1-antitrypsin deficiency. J Gastroenterol. 2019; 54(6):541-548. DOI:10.1007/s00535-019-01548-y). Furthermore, quantitative analysis by whole-slide morphometry of biopsy samples from individuals with alpha-1 antitrypsin deficiency (AATD) and Pi*ZZ phenotype (n=94) (i.e., homozygous for PiZ) showed that PAS D-stained globules occupy only a very small portion (<0.5%) of a given liver sample and that there is significant heterogeneity in accumulation of AAT polymer and globules polymer across biopsies despite the homogenous mutational background (Marek G, Collinsworth A, Liu C, et al. Quantitative measurement of the histological features of alpha-1 antitrypsin deficiency-associated liver disease in biopsy specimens. PLoS One. 2021; 16(8):e0256117. DOI:10.1371/joumal.pone.0256117).

[0511] In conclusion, a genetically engineered rat strain, the PiZ rat, has been developed that constitutes an immunocompetent animal model in which a single copy of the human SERPINA1 c.1096G>A allele is expressed under the endogenous Serpina1 promoter, resulting in the expression of the AAT p.Glu366Lys variant (i.e., PiZ) at levels relevant to human AATD. Two independent founder lines (Lines 18428 and 18574) exhibited similar characteristics (ie, copy number and sequence of the SERPINA1 c.1096G>A knock-in gene, and levels of human AAT and rat ALT in serum) and, thus, either line would be representative of the PiZ rat model. Line 18574 was selected for use in further studies of PiZ rats.

### Dose-Response Pharmacology in PiZ Rats

[0512] Experiments were undertaken to measure correction of the pathogenic SERPINA1 g.1096G>A allele in liver and corresponding changes in biomarkers (levels of human AAT protein in liver and serum, and levels of functional AAT in serum) using dose-response experiments in PiZ rats, 1 week after a single IV (bolus) administration of the Variant G Formulation at a total RNA dose ranging from 0.10 to 3.0 mg/kg.

[0513] A total of 66 PiZ rats (3 or 5 male or female rats per group; 8 weeks of age) were administered the Variant G Formulation as a single IV (bolus) injection (lateral tail vein) at a total RNA dose of 0.10, 0.25, 0.50, 1.0, 2.0, or 3.0 mg/kg, or normal saline as a control. One week after administration of test or control article, liver and ovary samples were collected for evaluation of corrected SERPINA1 alleles and human AAT protein (liver only). Both 4 days prior to and 1 week after administration of test or control article, serum samples were collected for evaluation of levels of human AAT and functional AAT.

[0514] All rats survived to scheduled euthanasia.

[0515] A Variant G Formulation dose-dependent increase in corrected SERPINA1 alleles in the liver was observed in male and female PiZ rats at Day 7, with no saturation in the dose range evaluated. Mean relative frequencies of corrected SERPINA1 alleles ranged from 4% (at a total RNA dose of 0.10 mg/kg) to 57% (at a total RNA dose of 3.0 mg/kg) in males, and from 3% (at a total RNA dose of 0.10 mg/kg) to 49% (at a total RNA dose of 3.0 mg/kg) in females (FIG. 54). The correction of the SERPINA1 g.1096G>A allele in ovaries, evaluated as an exploratory endpoint, was not dose responsive; the mean relative frequency of corrected SERPINA1 alleles was 2% at all doses evaluated (1.0, 2.0, and 3.0 mg/kg).

[0516] The Variant G Formulation dose-dependent increase in corrected SERPINA1 gene in liver at Day 7 was associated with a dose-dependent decrease in the abundance of pathogenic PiZ AAT variants in liver in male and female PiZ rats. The lowest abundances of PiZ AAT variants in liver were observed at the highest dose of the Variant G Formulation evaluated (mean decreases, relative to the vehicle control group, of 82% in males and 73% in females at 1.0 mg/kg) (FIG. 55).

[0517] In addition, the Variant G Formulation dose-dependent increase in corrected SERPINA1 alleles in liver at Day 7 was associated with a dose-dependent increase in total human AAT in serum, concomitant with a dose-dependent decrease in the levels of PiZ AAT variants (relative to total AAT) in serum, in male and female PiZ rats (FIG. 56). The greatest increases in the levels of total AAT in serum were observed at a Variant G Formulation total RNA dose of 2.0 mg/kg (mean changes of 2.6-fold in males and 2.0-fold in females, relative to baseline at Day −4). Corrected AAT variants were the predominant forms of AAT in serum at Variant G Formulation total RNA doses between 0.50 and 3.0 mg/kg (mean levels, relative to total AAT, of 76% to 98% in males, and 66% to 96% in females). Pathogenic PiZ AAT variants reached the lowest levels in serum at the highest dose of Variant G Formulation tested (mean levels, relative to total AAT, of 2% in males and 4% in females at a total RNA dose of 3.0 mg/kg).

[0518] Finally, a Variant G Formulation dose-dependent increase in functional AAT in serum was observed at Day 7 in male and female PiZ rats; the greatest increases were observed at the top 2 doses of the Variant G Formulation tested (median changes, relative to baseline at Day −4, of 2.6-fold in males at total RNA doses of 2.0 and 3.0 mg/kg, and 2.8-fold in females at a total RNA dose of 3.0 mg/kg).

[0519] These results demonstrated that a single IV (bolus) administration of the Variant G Formulation to PiZ rats resulted in a dose-dependent increase in corrected SERPINA1 alleles in the liver at Day 7, which was associated with decreased abundance of pathogenic PiZ AAT variants in the liver, concomitant with increased total human AAT protein and functional AAT in circulation and decreased pathogenic PiZ AAT variants in circulation.

### Durability Pharmacology Study in PiZ Rats

[0520] Experiments were undertaken to evaluate the durability of correction of the pathogenic SERPINA1 g.1096G>A allele in liver, and of the corresponding changes in biomarkers (levels of human AAT protein in liver and serum, and levels of functional AAT in serum) in PiZ rats up to 14 weeks after a single IV (bolus) administration of the Variant G Formulation at a dose of 0.50 mg/kg.

[0521] A total of 42 PiZ rats (2 to 6 male or female rats per group; 13 weeks of age) were administered the Variant G Formulation as a single IV (bolus) injection (lateral tail vein) at a total RNA dose of 0.50 mg/kg, or normal saline as a control. At 1 and 14 weeks after administration of test or control article, liver samples were collected for evaluation of corrected SERPINA1 alleles and human AAT protein. Both 2 days prior to and at Weeks 1, 4, and 14 after administration of test or control article, serum samples were collected for evaluation of levels of human AAT and functional AAT.

[0522] All rats survived to scheduled euthanasia.

[0523] Durable base-editing correction of the SERPINA1-g.1096G>A allele in liver was observed in male and female PiZ rats after administration of the Variant G Formulation. The mean relative frequencies of corrected SERPINA1 alleles at Weeks 1 and 14 were, respectively, 42% and 46% in males and 37% and 27% in females (FIG. 57).

[0524] The durable increase in corrected SERPINA1 alleles in liver through Week 14 was associated with a durable decrease in the abundance of pathogenic PiZ AAT variants in liver in male and female PiZ rats (mean decreases, relative to the vehicle control group [Week 1], of 58% in males and 61% in females at Week 1, and of 79% in males and 58% in females at Week 14).

[0525] In addition, the durable increase in corrected SERPINA1 alleles in liver through Week 14 was associated with a durable increase in total human AAT in serum, concomitant with a durable decrease in the levels of PiZ AAT variants (relative to total AAT) in serum, in male and female PiZ rats administered the Variant G Formulation. The mean increases in the levels of total human AAT in serum were approximately 2-, 2-, and 1.5-fold higher at Weeks 1, 4, and 14, respectively, than at baseline (Day −2) (both sexes) (FIG. 58). Corrected AAT variants were the predominant forms of AAT in serum during the period between Weeks 1 and 14 after administration of the Variant G Formulation (mean levels, relative to total AAT, of 80% to 83% in males and 77% to 68% in females); the decrease in the levels of PiZ AAT variants in serum was sustained between Weeks 1 and 14 (mean levels, relative to total AAT, of 20% at Week 1 and 17% at Week 14 in males, and of 23% at Week 1 and 32% at Week 14 in females) (FIG. 59). The levels of total human AAT in serum was observed to decline with age in PiZ rats; this observation, together with the stability in the levels of corrected and PiZ AAT, relative to total human AAT, between Weeks 1 and 14, suggested that the small decline observed in relative levels of total human AAT at Week 14 compared to Weeks 1 and 4 in the serum of rats administered the Variant G Formulation may be attributable to temporal dynamics in the model system.

[0526] An increase in functional AAT in serum was observed through Week 14 in male, but not in female PiZ rats administered the Variant G Formulation (mean changes, relative to baseline at Day −2, of 1.7-fold [both sexes] at Week 1, and 1.4-fold [males] and 1.0-fold [females] at Week 14). The return of functional AAT activity to baseline levels in female PiZ rats, at Week 14 after administration of the Variant G Formulation, could be a result of the decrease with age in the levels of human AAT in serum that has been observed in the PiZ rat model, which may have a different temporal dynamics between sexes in this model.

[0527] These results demonstrated that a single IV (bolus) administration of the Variant G Formulation to PiZ rats at a total RNA dose of 0.50 mg/kg resulted in a durable increase in corrected SERPINA1 alleles in the liver through Week 14, which was associated with a durable increase in total human AAT protein (both sexes) and functional AAT (detected only in males for the time period assessed) in circulation, and durable decrease of pathogenic PiZ AAT variants in circulation.

### OTHER EMBODIMENTS

[0528] From the foregoing description, it will be apparent that variations and modifications may be made to the aspects or embodiments described herein to adopt it to various usages and conditions. Such embodiments are also within the scope of the following claims.

[0529] The recitation of a listing of elements in any definition of a variable herein includes definitions of that variable as any single element or combination (or subcombination) of listed elements. The recitation of an embodiment herein includes that embodiment as any single embodiment or in combination with any other embodiments or portions thereof.

[0530] All patents and publications mentioned in this specification are herein incorporated by reference to the same extent as if each independent patent and publication was specifically and individually indicated to be incorporated by reference. The present disclosure may be related to International Application No. PCT/US2020/018195, the full disclosure of which is incorporated herein by reference in its entirety for all purposes.

The application's sequence listing, which the Patent Office published only in electronic form, follows.

SEQUENCE LISTING (594 sequences)

SEQ ID NO: 1 - protein, 167 aa, Escherichia coli
  REGION 1..167: note = misc_feature - TadA*7.10 (ecTadA) polypeptide sequence
MSEVEFSHEYWMRHALTLAKRARDEREVPVGAVLVLNNRVIGEGWNRAIGLHDPTAHAEIMALRQGGLVMQNYRLIDATLYVTFEPCVMCAGAMIHSRIGRVVFGVRNAKTGAAGSLMDVLHYPGMNHRVEITEGILADECAALLCYFFRMPRQVFNAQKKAQSSTD

SEQ ID NO: 2 - DNA, 4092 bp, synthetic construct
  misc_feature 1..4092: note = BhCas12b GGSGGS-ABE8-Xten20at P153 polynucleotide sequence
  misc_feature 1..6: note = Kozak sequence
  misc_feature 7..57: note = Sequence encoding N-terminal nuclear localization signal
  misc_feature 58..513: note = Sequence encoding BhCas12b
  misc_feature 514..531: note = Sequence encoding a linker
  misc_feature 532..1029: note = Sequence encoding TadA*8
  misc_feature 1030..1089: note = Sequence encoding Xten20 linker
  misc_feature 1090..3954: note = Sequence encoding BhCas12b
  misc_feature 3955..4002: note = Sequence encoding C-terminal NLS
  misc_feature 4003..4008: note = Sequence encoding GS linker
  misc_feature 4009..4089: note = Sequence encoding 3x hemagglutinin (HA) tag
  source 1..4092: mol_type = other DNA
gccaccatggccccaaagaagaagcggaaggtcggtatccacggagtcccagcagccgccaccagatccttcatcctgaagatcgagcccaacgaggaagtgaagaaaggcctctggaaaacccacgaggtgctgaaccacggaatcgcctactacatgaatatcctgaagctgatccggcaagaggccatctacgagcaccacgagcaggaccccaagaatcccaagaaggtgtccaaggccgagatccaggccgagctgtgggatttcgtgctgaagatgcagaagtgcaacagcttcacacacgaggtggacaaggacgaggtgttcaacatcctgagagagctgtacgaggaactggtgcccagcagcgtggaaaagaagggcgaagccaaccagctgagcaacaagtttctgtaccctctggtggaccccaacagccagtctggaaagggaacagccagcagcggcagaaagcccagatggtacaacctgaagattgccggcgatcccggaggctctggaggaagctccgaagtcgagttttcccatgagtactggatgagacacgcattgactctcgcaaagagggctcgagatgaacgcgaggtgcccgtgggggcagtactcgtgctcaacaatcgcgtaatcggcgaaggttggaatagggcaatcggactccacgaccccactgcacatgcggaaatcatggcccttcgacagggagggcttgtgatgcagaattatcgactttatgatgcgacgctgtacgtcacgtttgaaccttgcgtaatgtgcgcgggagctatgattcactcccgcattggacgagttgtattcggtgttcgcaacgccaagacgggtgccgcaggttcactgatggacgtgctgcatcatccaggcatgaaccaccgggtagaaatcacagaaggcatattggcggacgaatgtgcggcgctgttgtgtcgtttttttcgcatgcccaggcgggtctttaacgcccagaaaaaagcacaatcctctactgacggctcttctggatctgaaacacctggcacaagcgagagcgccacccctgagagctctggctcctgggaagaagagaagaagaagtgggaagaagataagaaaaaggacccgctggccaagatcctgggcaagctggctgagtacggactgatccctctgttcatcccctacaccgacagcaacgagcccatcgtgaaagaaatcaagtggatggaaaagtcccggaaccagagcgtgcggcggctggataaggacatgttcattcaggccctggaacggttcctgagctgggagagctggaacctgaaagtgaaagaggaatacgagaaggtcgagaaagagtacaagaccctggaagagaggatcaaagaggacatccaggctctgaaggctctggaacagtatgagaaagagcggcaagaacagctgctgcgggacaccctgaacaccaacgagtaccggctgagcaagagaggccttagaggctggcgggaaatcatccagaaatggctgaaaatggacgagaacgagccctccgagaagtacctggaagtgttcaaggactaccagcggaagcaccctagagaggccggcgattacagcgtgtacgagttcctgtccaagaaagagaaccacttcatctggcggaatcaccctgagtacccctacctgtacgccaccttctgcgagatcgacaagaaaaagaaggacgccaagcagcaggccaccttcacactggccgatcctatcaatcaccctctgtgggtccgattcgaggaaagaagcggcagcaacctgaacaagtacagaatcctgaccgagcagctgcacaccgagaagctgaagaaaaagctgacagtgcagctggaccggctgatctaccctacagaatctggcggctgggaagagaagggcaaagtggacattgtgctgctgcccagccggcagttctacaaccagatcttcctggacatcgaggaaaagggcaagcacgccttcacctacaaggatgagagcatcaagttccctctgaagggcacactcggcggagccagagtgcagttcgacagagatcacctgagaagataccctcacaaggtggaaagcggcaacgtgggcagaatctacttcaacatgaccgtgaacatcgagcctacagagtccccagtgtccaagtctctgaagatccaccgggacgacttccccaaggtggtcaacttcaagcccaaagaactgaccgagtggatcaaggacagcaagggcaagaaactgaagtccggcatcgagtccctggaaatcggcctgagagtgatgagcatcgacctgggacagagacaggccgctgccgcctctattttcgaggtggtggatcagaagcccgacatcgaaggcaagctgtttttcccaatcaagggcaccgagctgtatgccgtgcacagagccagcttcaacatcaagctgcccggcgagacactggtcaagagcagagaagtgctgcggaaggccagagaggacaatctgaaactgatgaaccagaagctcaacttcctgcggaacgtgctgcacttccagcagttcgaggacatcaccgagagagagaagcgggtcaccaagtggatcagcagacaagagaacagcgacgtgcccctggtgtaccaggatgagctgatccagatccgcgagctgatgtacaagccttacaaggactgggtcgccttcctgaagcagctccacaagagactggaagtcgagatcggcaaagaagtgaagcactggcggaagtccctgagcgacggaagaaagggcctgtacggcatctccctgaagaacatcgacgagatcgatcggacccggaagttcctgctgagatggtccctgaggcctaccgaacctggcgaagtgcgtagactggaacccggccagagattcgccatcgaccagctgaatcacctgaacgccctgaaagaagatcggctgaagaagatggccaacaccatcatcatgcacgccctgggctactgctacgacgtgcggaagaagaaatggcaggctaagaaccccgcctgccagatcatcctgttcgaggatctgagcaactacaacccctacgaggaaaggtcccgcttcgagaacagcaagctcatgaagtggtccagacgcgagatccccagacaggttgcactgcagggcgagatctatggcctgcaagtgggagaagtgggcgctcagttcagcagcagattccacgccaagacaggcagccctggcatcagatgtagcgtcgtgaccaaagagaagctgcaggacaatcggttcttcaagaatctgcagagagagggcagactgaccctggacaaaatcgccgtgctgaaagagggcgatctgtacccagacaaaggcggcgagaagttcatcagcctgagcaaggatcggaagtgcgtgaccacacacgccgacatcaacgccgctcagaacctgcagaagcggttctggacaagaacccacggcttctacaaggtgtactgcaaggcctaccaggtggacggccagaccgtgtacatccctgagagcaaggaccagaagcagaagatcatcgaagagttcggcgagggctacttcattctgaaggacggggtgtacgaatgggtcaacgccggcaagctgaaaatcaagaagggcagctccaagcagagcagcagcgagctggtggatagcgacatcctgaaagacagcttcgacctggcctccgagctgaaaggcgaaaagctgatgctgtacagggaccccagcggcaatgtgttccccagcgacaaatggatggccgctggcgtgttcttcggaaagctggaacgcatcctgatcagcaagctgaccaaccagtactccatcagcaccatcgaggacgacagcagcaagcagtctatgaaaaggccggcggccacgaaaaaggccggccaggcaaaaaagaaaaagggatcctacccatacgatgttccagattacgcttatccctacgacgtgcctgattatgcatacccatatgatgtccccgactatgcctaa

SEQ ID NO: 3 - protein, 1361 aa, synthetic construct
  REGION 1..1361: note = BhCas12b GGSGGS-ABE8-Xten20at P153 polypeptide sequence
MAPKKKRKVGIHGVPAAATRSFILKIEPNEEVKKGLWKTHEVLNHGIAYYMNILKLIRQEAIYEHHEQDPKNPKKVSKAEIQAELWDFVLKMQKCNSFTHEVDKDEVFNILRELYEELVPSSVEKKGEANQLSNKFLYPLVDPNSQSGKGTASSGRKPRWYNLKIAGDPGGSGGSSEVEFSHEYWMRHALTLAKRARDEREVPVGAVLVLNNRVIGEGWNRAIGLHDPTAHAEIMALRQGGLVMQNYRLYDATLYVTFEPCVMCAGAMIHSRIGRVVFGVRNAKTGAAGSLMDVLHHPGMNHRVEITEGILADECAALLCRFFRMPRRVFNAQKKAQSSTDGSSGSETPGTSESATPESSGSWEEEKKKWEEDKKKDPLAKILGKLAEYGLIPLFIPYTDSNEPIVKEIKWMEKSRNQSVRRLDKDMFIQALERFLSWESWNLKVKEEYEKVEKEYKTLEERIKEDIQALKALEQYEKERQEQLLRDTLNTNEYRLSKRGLRGWREIIQKWLKMDENEPSEKYLEVFKDYQRKHPREAGDYSVYEFLSKKENHFIWRNHPEYPYLYATFCEIDKKKKDAKQQATFTLADPINHPLWVRFEERSGSNLNKYRILTEQLHTEKLKKKLTVQLDRLIYPTESGGWEEKGKVDIVLLPSRQFYNQIFLDIEEKGKHAFTYKDESIKFPLKGTLGGARVQFDRDHLRRYPHKVESGNVGRIYFNMTVNIEPTESPVSKSLKIHRDDFPKVVNFKPKELTEWIKDSKGKKLKSGIESLEIGLRVMSIDLGQRQAAAASIFEVVDQKPDIEGKLFFPIKGTELYAVHRASFNIKLPGETLVKSREVLRKAREDNLKLMNQKLNFLRNVLHFQQFEDITEREKRVTKWISRQENSDVPLVYQDELIQIRELMYKPYKDWVAFLKQLHKRLEVEIGKEVKHWRKSLSDGRKGLYGISLKNIDEIDRTRKFLLRWSLRPTEPGEVRRLEPGQRFAIDQLNHLNALKEDRLKKMANTIIMHALGYCYDVRKKKWQAKNPACQIILFEDLSNYNPYEERSRFENSKLMKWSRREIPRQVALQGEIYGLQVGEVGAQFSSRFHAKTGSPGIRCSVVTKEKLQDNRFFKNLQREGRLTLDKIAVLKEGDLYPDKGGEKFISLSKDRKCVTTHADINAAQNLQKRFWTRTHGFYKVYCKAYQVDGQTVYIPESKDQKQKIIEEFGEGYFILKDGVYEWVNAGKLKIKKGSSKQSSSELVDSDILKDSFDLASELKGEKLMLYRDPSGNVFPSDKWMAAGVFFGKLERILISKLTNQYSISTIEDDSSKQSMKRPAATKKAGQAKKKKGSYPYDVPDYAYPYDVPDYAYPYDVPDYA

SEQ ID NO: 4 - DNA, 4092 bp, synthetic construct
  misc_feature 1..4092: note = BhCas12b GGSGGS-ABE8-Xten20at K255 polynucleotide sequence
  misc_feature 1..6: note = Kozak sequence
  misc_feature 7..57: note = Sequence encoding N-terminal nuclear localization signal (NLS)
  misc_feature 58..822: note = Sequence encoding BhCas12b
  misc_feature 823..840: note = Sequence encoding a linker
  misc_feature 841..1338: note = Sequence encoding TadA*8
  misc_feature 1339..1398: note = Sequence encoding Xten20 linker
  misc_feature 1399..3954: note = Sequence encoding BhCas12b
  misc_feature 3955..4002: note = Sequence encoding C-terminal NLS
  misc_feature 4003..4008: note = Sequence encoding a GS linker
  misc_feature 4009..4089: note = Sequence encoding 3x hemagglutinin (HA) tag
  source 1..4092: mol_type = other DNA
gccaccatggccccaaagaagaagcggaaggtcggtatccacggagtcccagcagccgccaccagatccttcatcctgaagatcgagcccaacgaggaagtgaagaaaggcctctggaaaacccacgaggtgctgaaccacggaatcgcctactacatgaatatcctgaagctgatccggcaagaggccatctacgagcaccacgagcaggaccccaagaatcccaagaaggtgtccaaggccgagatccaggccgagctgtgggatttcgtgctgaagatgcagaagtgcaacagcttcacacacgaggtggacaaggacgaggtgttcaacatcctgagagagctgtacgaggaactggtgcccagcagcgtggaaaagaagggcgaagccaaccagctgagcaacaagtttctgtaccctctggtggaccccaacagccagtctggaaagggaacagccagcagcggcagaaagcccagatggtacaacctgaagattgccggcgatccctcctgggaagaagagaagaagaagtgggaagaagataagaaaaaggacccgctggccaagatcctgggcaagctggctgagtacggactgatccctctgttcatcccctacaccgacagcaacgagcccatcgtgaaagaaatcaagtggatggaaaagtcccggaaccagagcgtgcggcggctggataaggacatgttcattcaggccctggaacggttcctgagctgggagagctggaacctgaaagtgaaagaggaatacgagaaggtcgagaaagagtacaagaccctggaagagaggatcaaaggaggctctggaggaagctccgaagtcgagttttcccatgagtactggatgagacacgcattgactctcgcaaagagggctcgagatgaacgcgaggtgcccgtgggggcagtactcgtgctcaacaatcgcgtaatcggcgaaggttggaatagggcaatcggactccacgaccccactgcacatgcggaaatcatggcccttcgacagggagggcttgtgatgcagaattatcgactttatgatgcgacgctgtacgtcacgtttgaaccttgcgtaatgtgcgcgggagctatgattcactcccgcattggacgagttgtattcggtgttcgcaacgccaagacgggtgccgcaggttcactgatggacgtgctgcatcatccaggcatgaaccaccgggtagaaatcacagaaggcatattggcggacgaatgtgcggcgctgttgtgtcgtttttttcgcatgcccaggcgggtctttaacgcccagaaaaaagcacaatcctctactgacggctcttctggatctgaaacacctggcacaagcgagagcgccacccctgagagctctggcgaggacatccaggctctgaaggctctggaacagtatgagaaagagcggcaagaacagctgctgcgggacaccctgaacaccaacgagtaccggctgagcaagagaggccttagaggctggcgggaaatcatccagaaatggctgaaaatggacgagaacgagccctccgagaagtacctggaagtgttcaaggactaccagcggaagcaccctagagaggccggcgattacagcgtgtacgagttcctgtccaagaaagagaaccacttcatctggcggaatcaccctgagtacccctacctgtacgccaccttctgcgagatcgacaagaaaaagaaggacgccaagcagcaggccaccttcacactggccgatcctatcaatcaccctctgtgggtccgattcgaggaaagaagcggcagcaacctgaacaagtacagaatcctgaccgagcagctgcacaccgagaagctgaagaaaaagctgacagtgcagctggaccggctgatctaccctacagaatctggcggctgggaagagaagggcaaagtggacattgtgctgctgcccagccggcagttctacaaccagatcttcctggacatcgaggaaaagggcaagcacgccttcacctacaaggatgagagcatcaagttccctctgaagggcacactcggcggagccagagtgcagttcgacagagatcacctgagaagataccctcacaaggtggaaagcggcaacgtgggcagaatctacttcaacatgaccgtgaacatcgagcctacagagtccccagtgtccaagtctctgaagatccaccgggacgacttccccaaggtggtcaacttcaagcccaaagaactgaccgagtggatcaaggacagcaagggcaagaaactgaagtccggcatcgagtccctggaaatcggcctgagagtgatgagcatcgacctgggacagagacaggccgctgccgcctctattttcgaggtggtggatcagaagcccgacatcgaaggcaagctgtttttcccaatcaagggcaccgagctgtatgccgtgcacagagccagcttcaacatcaagctgcccggcgagacactggtcaagagcagagaagtgctgcggaaggccagagaggacaatctgaaactgatgaaccagaagctcaacttcctgcggaacgtgctgcacttccagcagttcgaggacatcaccgagagagagaagcgggtcaccaagtggatcagcagacaagagaacagcgacgtgcccctggtgtaccaggatgagctgatccagatccgcgagctgatgtacaagccttacaaggactgggtcgccttcctgaagcagctccacaagagactggaagtcgagatcggcaaagaagtgaagcactggcggaagtccctgagcgacggaagaaagggcctgtacggcatctccctgaagaacatcgacgagatcgatcggacccggaagttcctgctgagatggtccctgaggcctaccgaacctggcgaagtgcgtagactggaacccggccagagattcgccatcgaccagctgaatcacctgaacgccctgaaagaagatcggctgaagaagatggccaacaccatcatcatgcacgccctgggctactgctacgacgtgcggaagaagaaatggcaggctaagaaccccgcctgccagatcatcctgttcgaggatctgagcaactacaacccctacgaggaaaggtcccgcttcgagaacagcaagctcatgaagtggtccagacgcgagatccccagacaggttgcactgcagggcgagatctatggcctgcaagtgggagaagtgggcgctcagttcagcagcagattccacgccaagacaggcagccctggcatcagatgtagcgtcgtgaccaaagagaagctgcaggacaatcggttcttcaagaatctgcagagagagggcagactgaccctggacaaaatcgccgtgctgaaagagggcgatctgtacccagacaaaggcggcgagaagttcatcagcctgagcaaggatcggaagtgcgtgaccacacacgccgacatcaacgccgctcagaacctgcagaagcggttctggacaagaacccacggcttctacaaggtgtactgcaaggcctaccaggtggacggccagaccgtgtacatccctgagagcaaggaccagaagcagaagatcatcgaagagttcggcgagggctacttcattctgaaggacggggtgtacgaatgggtcaacgccggcaagctgaaaatcaagaagggcagctccaagcagagcagcagcgagctggtggatagcgacatcctgaaagacagcttcgacctggcctccgagctgaaaggcgaaaagctgatgctgtacagggaccccagcggcaatgtgttccccagcgacaaatggatggccgctggcgtgttcttcggaaagctggaacgcatcctgatcagcaagctgaccaaccagtactccatcagcaccatcgaggacgacagcagcaagcagtctatgaaaaggccggcggccacgaaaaaggccggccaggcaaaaaagaaaaagggatcctacccatacgatgttccagattacgcttatccctacgacgtgcctgattatgcatacccatatgatgtccccgactatgcctaa

SEQ ID NO: 5 - protein, 1361 aa, synthetic construct
  REGION 1..1361: note = BhCas12b GGSGGS-ABE8-Xten20at K255 polypeptide sequence
MAPKKKRKVGIHGVPAAATRSFILKIEPNEEVKKGLWKTHEVLNHGIAYYMNILKLIRQEAIYEHHEQDPKNPKKVSKAEIQAELWDFVLKMQKCNSFTHEVDKDEVFNILRELYEELVPSSVEKKGEANQLSNKFLYPLVDPNSQSGKGTASSGRKPRWYNLKIAGDPSWEEEKKKWEEDKKKDPLAKILGKLAEYGLIPLFIPYTDSNEPIVKEIKWMEKSRNQSVRRLDKDMFIQALERFLSWESWNLKVKEEYEKVEKEYKTLEERIKGGSGGSSEVEFSHEYWMRHALTLAKRARDEREVPVGAVLVLNNRVIGEGWNRAIGLHDPTAHAEIMALRQGGLVMQNYRLYDATLYVTFEPCVMCAGAMIHSRIGRVVFGVRNAKTGAAGSLMDVLHHPGMNHRVEITEGILADECAALLCRFFRMPRRVFNAQKKAQSSTDGSSGSETPGTSESATPESSGEDIQALKALEQYEKERQEQLLRDTLNTNEYRLSKRGLRGWREIIQKWLKMDENEPSEKYLEVFKDYQRKHPREAGDYSVYEFLSKKENHFIWRNHPEYPYLYATFCEIDKKKKDAKQQATFTLADPINHPLWVRFEERSGSNLNKYRILTEQLHTEKLKKKLTVQLDRLIYPTESGGWEEKGKVDIVLLPSRQFYNQIFLDIEEKGKHAFTYKDESIKFPLKGTLGGARVQFDRDHLRRYPHKVESGNVGRIYFNMTVNIEPTESPVSKSLKIHRDDFPKVVNFKPKELTEWIKDSKGKKLKSGIESLEIGLRVMSIDLGQRQAAAASIFEVVDQKPDIEGKLFFPIKGTELYAVHRASFNIKLPGETLVKSREVLRKAREDNLKLMNQKLNFLRNVLHFQQFEDITEREKRVTKWISRQENSDVPLVYQDELIQIRELMYKPYKDWVAFLKQLHKRLEVEIGKEVKHWRKSLSDGRKGLYGISLKNIDEIDRTRKFLLRWSLRPTEPGEVRRLEPGQRFAIDQLNHLNALKEDRLKKMANTIIMHALGYCYDVRKKKWQAKNPACQIILFEDLSNYNPYEERSRFENSKLMKWSRREIPRQVALQGEIYGLQVGEVGAQFSSRFHAKTGSPGIRCSVVTKEKLQDNRFFKNLQREGRLTLDKIAVLKEGDLYPDKGGEKFISLSKDRKCVTTHADINAAQNLQKRFWTRTHGFYKVYCKAYQVDGQTVYIPESKDQKQKIIEEFGEGYFILKDGVYEWVNAGKLKIKKGSSKQSSSELVDSDILKDSFDLASELKGEKLMLYRDPSGNVFPSDKWMAAGVFFGKLERILISKLTNQYSISTIEDDSSKQSMKRPAATKKAGQAKKKKGSYPYDVPDYAYPYDVPDYAYPYDVPDYA

SEQ ID NO: 6 - DNA, 4092 bp, synthetic construct
  misc_feature 1..4092: note = BhCas12b GGSGGS-ABE8-Xten20at D306 polynucleotide sequence
  misc_feature 1..6: note = Kozak sequence
  misc_feature 7..57: note = Sequence encoding N-terminal nuclear localization signal (NLS)
  misc_feature 58..975: note = Sequence encoding BhCas12b
  misc_feature 976..993: note = Sequence encoding a linker
  misc_feature 994..1491: note = Sequence encoding TadA*8
  misc_feature 1492..1551: note = Sequence encoding Xten20 linker
  misc_feature 1552..3954: note = Sequence encoding BhCas12b
  misc_feature 3955..4002: note = Sequence encoding C-terminal NLS
  misc_feature 4003..4008: note = Sequence encoding a GS linker
  misc_feature 4009..4089: note = Sequence encoding 3x hemagglutinin (HA) tag
  source 1..4092: mol_type = other DNA
gccaccatggccccaaagaagaagcggaaggtcggtatccacggagtcccagcagccgccaccagatccttcatcctgaagatcgagcccaacgaggaagtgaagaaaggcctctggaaaacccacgaggtgctgaaccacggaatcgcctactacatgaatatcctgaagctgatccggcaagaggccatctacgagcaccacgagcaggaccccaagaatcccaagaaggtgtccaaggccgagatccaggccgagctgtgggatttcgtgctgaagatgcagaagtgcaacagcttcacacacgaggtggacaaggacgaggtgttcaacatcctgagagagctgtacgaggaactggtgcccagcagcgtggaaaagaagggcgaagccaaccagctgagcaacaagtttctgtaccctctggtggaccccaacagccagtctggaaagggaacagccagcagcggcagaaagcccagatggtacaacctgaagattgccggcgatccctcctgggaagaagagaagaagaagtgggaagaagataagaaaaaggacccgctggccaagatcctgggcaagctggctgagtacggactgatccctctgttcatcccctacaccgacagcaacgagcccatcgtgaaagaaatcaagtggatggaaaagtcccggaaccagagcgtgcggcggctggataaggacatgttcattcaggccctggaacggttcctgagctgggagagctggaacctgaaagtgaaagaggaatacgagaaggtcgagaaagagtacaagaccctggaagagaggatcaaagaggacatccaggctctgaaggctctggaacagtatgagaaagagcggcaagaacagctgctgcgggacaccctgaacaccaacgagtaccggctgagcaagagaggccttagaggctggcgggaaatcatccagaaatggctgaaaatggacggaggctctggaggaagctccgaagtcgagttttcccatgagtactggatgagacacgcattgactctcgcaaagagggctcgagatgaacgcgaggtgcccgtgggggcagtactcgtgctcaacaatcgcgtaatcggcgaaggttggaatagggcaatcggactccacgaccccactgcacatgcggaaatcatggcccttcgacagggagggcttgtgatgcagaattatcgactttatgatgcgacgctgtacgtcacgtttgaaccttgcgtaatgtgcgcgggagctatgattcactcccgcattggacgagttgtattcggtgttcgcaacgccaagacgggtgccgcaggttcactgatggacgtgctgcatcatccaggcatgaaccaccgggtagaaatcacagaaggcatattggcggacgaatgtgcggcgctgttgtgtcgtttttttcgcatgcccaggcgggtctttaacgcccagaaaaaagcacaatcctctactgacggctcttctggatctgaaacacctggcacaagcgagagcgccacccctgagagctctggcgagaacgagccctccgagaagtacctggaagtgttcaaggactaccagcggaagcaccctagagaggccggcgattacagcgtgtacgagttcctgtccaagaaagagaaccacttcatctggcggaatcaccctgagtacccctacctgtacgccaccttctgcgagatcgacaagaaaaagaaggacgccaagcagcaggccaccttcacactggccgatcctatcaatcaccctctgtgggtccgattcgaggaaagaagcggcagcaacctgaacaagtacagaatcctgaccgagcagctgcacaccgagaagctgaagaaaaagctgacagtgcagctggaccggctgatctaccctacagaatctggcggctgggaagagaagggcaaagtggacattgtgctgctgcccagccggcagttctacaaccagatcttcctggacatcgaggaaaagggcaagcacgccttcacctacaaggatgagagcatcaagttccctctgaagggcacactcggcggagccagagtgcagttcgacagagatcacctgagaagataccctcacaaggtggaaagcggcaacgtgggcagaatctacttcaacatgaccgtgaacatcgagcctacagagtccccagtgtccaagtctctgaagatccaccgggacgacttccccaaggtggtcaacttcaagcccaaagaactgaccgagtggatcaaggacagcaagggcaagaaactgaagtccggcatcgagtccctggaaatcggcctgagagtgatgagcatcgacctgggacagagacaggccgctgccgcctctattttcgaggtggtggatcagaagcccgacatcgaaggcaagctgtttttcccaatcaagggcaccgagctgtatgccgtgcacagagccagcttcaacatcaagctgcccggcgagacactggtcaagagcagagaagtgctgcggaaggccagagaggacaatctgaaactgatgaaccagaagctcaacttcctgcggaacgtgctgcacttccagcagttcgaggacatcaccgagagagagaagcgggtcaccaagtggatcagcagacaagagaacagcgacgtgcccctggtgtaccaggatgagctgatccagatccgcgagctgatgtacaagccttacaaggactgggtcgccttcctgaagcagctccacaagagactggaagtcgagatcggcaaagaagtgaagcactggcggaagtccctgagcgacggaagaaagggcctgtacggcatctccctgaagaacatcgacgagatcgatcggacccggaagttcctgctgagatggtccctgaggcctaccgaacctggcgaagtgcgtagactggaacccggccagagattcgccatcgaccagctgaatcacctgaacgccctgaaagaagatcggctgaagaagatggccaacaccatcatcatgcacgccctgggctactgctacgacgtgcggaagaagaaatggcaggctaagaaccccgcctgccagatcatcctgttcgaggatctgagcaactacaacccctacgaggaaaggtcccgcttcgagaacagcaagctcatgaagtggtccagacgcgagatccccagacaggttgcactgcagggcgagatctatggcctgcaagtgggagaagtgggcgctcagttcagcagcagattccacgccaagacaggcagccctggcatcagatgtagcgtcgtgaccaaagagaagctgcaggacaatcggttcttcaagaatctgcagagagagggcagactgaccctggacaaaatcgccgtgctgaaagagggcgatctgtacccagacaaaggcggcgagaagttcatcagcctgagcaaggatcggaagtgcgtgaccacacacgccgacatcaacgccgctcagaacctgcagaagcggttctggacaagaacccacggcttctacaaggtgtactgcaaggcctaccaggtggacggccagaccgtgtacatccctgagagcaaggaccagaagcagaagatcatcgaagagttcggcgagggctacttcattctgaaggacggggtgtacgaatgggtcaacgccggcaagctgaaaatcaagaagggcagctccaagcagagcagcagcgagctggtggatagcgacatcctgaaagacagcttcgacctggcctccgagctgaaaggcgaaaagctgatgctgtacagggaccccagcggcaatgtgttccccagcgacaaatggatggccgctggcgtgttcttcggaaagctggaacgcatcctgatcagcaagctgaccaaccagtactccatcagcaccatcgaggacgacagcagcaagcagtctatgaaaaggccggcggccacgaaaaaggccggccaggcaaaaaagaaaaagggatcctacccatacgatgttccagattacgcttatccctacgacgtgcctgattatgcatacccatatgatgtccccgactatgcctaa

SEQ ID NO: 7 - protein, 1361 aa, synthetic construct
  REGION 1..1361: note = BhCas12b GGSGGS-ABE8-Xten20at D306 polypeptide sequence
MAPKKKRKVGIHGVPAAATRSFILKIEPNEEVKKGLWKTHEVLNHGIAYYMNILKLIRQEAIYEHHEQDPKNPKKVSKAEIQAELWDFVLKMQKCNSFTHEVDKDEVFNILRELYEELVPSSVEKKGEANQLSNKFLYPLVDPNSQSGKGTASSGRKPRWYNLKIAGDPSWEEEKKKWEEDKKKDPLAKILGKLAEYGLIPLFIPYTDSNEPIVKEIKWMEKSRNQSVRRLDKDMFIQALERFLSWESWNLKVKEEYEKVEKEYKTLEERIKEDIQALKALEQYEKERQEQLLRDTLNTNEYRLSKRGLRGWREIIQKWLKMDGGSGGSSEVEFSHEYWMRHALTLAKRARDEREVPVGAVLVLNNRVIGEGWNRAIGLHDPTAHAEIMALRQGGLVMQNYRLYDATLYVTFEPCVMCAGAMIHSRIGRVVFGVRNAKTGAAGSLMDVLHHPGMNHRVEITEGILADECAALLCRFFRMPRRVFNAQKKAQSSTDGSSGSETPGTSESATPESSGENEPSEKYLEVFKDYQRKHPREAGDYSVYEFLSKKENHFIWRNHPEYPYLYATFCEIDKKKKDAKQQATFTLADPINHPLWVRFEERSGSNLNKYRILTEQLHTEKLKKKLTVQLDRLIYPTESGGWEEKGKVDIVLLPSRQFYNQIFLDIEEKGKHAFTYKDESIKFPLKGTLGGARVQFDRDHLRRYPHKVESGNVGRIYFNMTVNIEPTESPVSKSLKIHRDDFPKVVNFKPKELTEWIKDSKGKKLKSGIESLEIGLRVMSIDLGQRQAAAASIFEVVDQKPDIEGKLFFPIKGTELYAVHRASFNIKLPGETLVKSREVLRKAREDNLKLMNQKLNFLRNVLHFQQFEDITEREKRVTKWISRQENSDVPLVYQDELIQIRELMYKPYKDWVAFLKQLHKRLEVEIGKEVKHWRKSLSDGRKGLYGISLKNIDEIDRTRKFLLRWSLRPTEPGEVRRLEPGQRFAIDQLNHLNALKEDRLKKMANTIIMHALGYCYDVRKKKWQAKNPACQIILFEDLSNYNPYEERSRFENSKLMKWSRREIPRQVALQGEIYGLQVGEVGAQFSSRFHAKTGSPGIRCSVVTKEKLQDNRFFKNLQREGRLTLDKIAVLKEGDLYPDKGGEKFISLSKDRKCVTTHADINAAQNLQKRFWTRTHGFYKVYCKAYQVDGQTVYIPESKDQKQKIIEEFGEGYFILKDGVYEWVNAGKLKIKKGSSKQSSSELVDSDILKDSFDLASELKGEKLMLYRDPSGNVFPSDKWMAAGVFFGKLERILISKLTNQYSISTIEDDSSKQSMKRPAATKKAGQAKKKKGSYPYDVPDYAYPYDVPDYAYPYDVPDYA

SEQ ID NO: 8 - DNA, 4092 bp, synthetic construct
  misc_feature 1..4092: note = BhCas12b GGSGGS-ABE8-Xten20at D980 polynucleotide sequence
  misc_feature 1..6: note = Kozak sequence
  misc_feature 7..57: note = Sequence encoding N-terminal nuclear localization signal (NLS)
  misc_feature 58..2997: note = Sequence encoding BhCas12b
  misc_feature 2998..3015: note = Sequence encoding a linker
  misc_feature 3016..3513: note = Sequence encoding TadA*8
  misc_feature 3514..3573: note = Sequence encoding Xten20 linker
  misc_feature 3574..3954: note = Sequence encoding BhCas12b
  misc_feature 3955..4002: note = Sequence encoding C-terminal NLS
  misc_feature 4003..4008: note = Sequence encoding a GS linker
  misc_feature 4009..4089: note = Sequence encoding 3x hemagglutinin (HA) tag
  source 1..4092: mol_type = other DNA
gccaccatggccccaaagaagaagcggaaggtcggtatccacggagtcccagcagccgccaccagatccttcatcctgaagatcgagcccaacgaggaagtgaagaaaggcctctggaaaacccacgaggtgctgaaccacggaatcgcctactacatgaatatcctgaagctgatccggcaagaggccatctacgagcaccacgagcaggaccccaagaatcccaagaaggtgtccaaggccgagatccaggccgagctgtgggatttcgtgctgaagatgcagaagtgcaacagcttcacacacgaggtggacaaggacgaggtgttcaacatcctgagagagctgtacgaggaactggtgcccagcagcgtggaaaagaagggcgaagccaaccagctgagcaacaagtttctgtaccctctggtggaccccaacagccagtctggaaagggaacagccagcagcggcagaaagcccagatggtacaacctgaagattgccggcgatccctcctgggaagaagagaagaagaagtgggaagaagataagaaaaaggacccgctggccaagatcctgggcaagctggctgagtacggactgatccctctgttcatcccctacaccgacagcaacgagcccatcgtgaaagaaatcaagtggatggaaaagtcccggaaccagagcgtgcggcggctggataaggacatgttcattcaggccctggaacggttcctgagctgggagagctggaacctgaaagtgaaagaggaatacgagaaggtcgagaaagagtacaagaccctggaagagaggatcaaagaggacatccaggctctgaaggctctggaacagtatgagaaagagcggcaagaacagctgctgcgggacaccctgaacaccaacgagtaccggctgagcaagagaggccttagaggctggcgggaaatcatccagaaatggctgaaaatggacgagaacgagccctccgagaagtacctggaagtgttcaaggactaccagcggaagcaccctagagaggccggcgattacagcgtgtacgagttcctgtccaagaaagagaaccacttcatctggcggaatcaccctgagtacccctacctgtacgccaccttctgcgagatcgacaagaaaaagaaggacgccaagcagcaggccaccttcacactggccgatcctatcaatcaccctctgtgggtccgattcgaggaaagaagcggcagcaacctgaacaagtacagaatcctgaccgagcagctgcacaccgagaagctgaagaaaaagctgacagtgcagctggaccggctgatctaccctacagaatctggcggctgggaagagaagggcaaagtggacattgtgctgctgcccagccggcagttctacaaccagatcttcctggacatcgaggaaaagggcaagcacgccttcacctacaaggatgagagcatcaagttccctctgaagggcacactcggcggagccagagtgcagttcgacagagatcacctgagaagataccctcacaaggtggaaagcggcaacgtgggcagaatctacttcaacatgaccgtgaacatcgagcctacagagtccccagtgtccaagtctctgaagatccaccgggacgacttccccaaggtggtcaacttcaagcccaaagaactgaccgagtggatcaaggacagcaagggcaagaaactgaagtccggcatcgagtccctggaaatcggcctgagagtgatgagcatcgacctgggacagagacaggccgctgccgcctctattttcgaggtggtggatcagaagcccgacatcgaaggcaagctgtttttcccaatcaagggcaccgagctgtatgccgtgcacagagccagcttcaacatcaagctgcccggcgagacactggtcaagagcagagaagtgctgcggaaggccagagaggacaatctgaaactgatgaaccagaagctcaacttcctgcggaacgtgctgcacttccagcagttcgaggacatcaccgagagagagaagcgggtcaccaagtggatcagcagacaagagaacagcgacgtgcccctggtgtaccaggatgagctgatccagatccgcgagctgatgtacaagccttacaaggactgggtcgccttcctgaagcagctccacaagagactggaagtcgagatcggcaaagaagtgaagcactggcggaagtccctgagcgacggaagaaagggcctgtacggcatctccctgaagaacatcgacgagatcgatcggacccggaagttcctgctgagatggtccctgaggcctaccgaacctggcgaagtgcgtagactggaacccggccagagattcgccatcgaccagctgaatcacctgaacgccctgaaagaagatcggctgaagaagatggccaacaccatcatcatgcacgccctgggctactgctacgacgtgcggaagaagaaatggcaggctaagaaccccgcctgccagatcatcctgttcgaggatctgagcaactacaacccctacgaggaaaggtcccgcttcgagaacagcaagctcatgaagtggtccagacgcgagatccccagacaggttgcactgcagggcgagatctatggcctgcaagtgggagaagtgggcgctcagttcagcagcagattccacgccaagacaggcagccctggcatcagatgtagcgtcgtgaccaaagagaagctgcaggacaatcggttcttcaagaatctgcagagagagggcagactgaccctggacaaaatcgccgtgctgaaagagggcgatctgtacccagacaaaggcggcgagaagttcatcagcctgagcaaggatcggaagtgcgtgaccacacacgccgacatcaacgccgctcagaacctgcagaagcggttctggacaagaacccacggcttctacaaggtgtactgcaaggcctaccaggtggacggaggctctggaggaagctccgaagtcgagttttcccatgagtactggatgagacacgcattgactctcgcaaagagggctcgagatgaacgcgaggtgcccgtgggggcagtactcgtgctcaacaatcgcgtaatcggcgaaggttggaatagggcaatcggactccacgaccccactgcacatgcggaaatcatggcccttcgacagggagggcttgtgatgcagaattatcgactttatgatgcgacgctgtacgtcacgtttgaaccttgcgtaatgtgcgcgggagctatgattcactcccgcattggacgagttgtattcggtgttcgcaacgccaagacgggtgccgcaggttcactgatggacgtgctgcatcatccaggcatgaaccaccgggtagaaatcacagaaggcatattggcggacgaatgtgcggcgctgttgtgtcgtttttttcgcatgcccaggcgggtctttaacgcccagaaaaaagcacaatcctctactgacggctcttctggatctgaaacacctggcacaagcgagagcgccacccctgagagctctggcggccagaccgtgtacatccctgagagcaaggaccagaagcagaagatcatcgaagagttcggcgagggctacttcattctgaaggacggggtgtacgaatgggtcaacgccggcaagctgaaaatcaagaagggcagctccaagcagagcagcagcgagctggtggatagcgacatcctgaaagacagcttcgacctggcctccgagctgaaaggcgaaaagctgatgctgtacagggaccccagcggcaatgtgttccccagcgacaaatggatggccgctggcgtgttcttcggaaagctggaacgcatcctgatcagcaagctgaccaaccagtactccatcagcaccatcgaggacgacagcagcaagcagtctatgaaaaggccggcggccacgaaaaaggccggccaggcaaaaaagaaaaagggatcctacccatacgatgttccagattacgcttatccctacgacgtgcctgattatgcatacccatatgatgtccccgactatgcctaa

SEQ ID NO: 9 - protein, 1361 aa, synthetic construct
  REGION 1..1361: note = BhCas12b GGSGGS-ABE8-Xten20at D980 polypeptide sequence
MAPKKKRKVGIHGVPAAATRSFILKIEPNEEVKKGLWKTHEVLNHGIAYYMNILKLIRQEAIYEHHEQDPKNPKKVSKAEIQAELWDFVLKMQKCNSFTHEVDKDEVFNILRELYEELVPSSVEKKGEANQLSNKFLYPLVDPNSQSGKGTASSGRKPRWYNLKIAGDPSWEEEKKKWEEDKKKDPLAKILGKLAEYGLIPLFIPYTDSNEPIVKEIKWMEKSRNQSVRRLDKDMFIQALERFLSWESWNLKVKEEYEKVEKEYKTLEERIKEDIQALKALEQYEKERQEQLLRDTLNTNEYRLSKRGLRGWREIIQKWLKMDENEPSEKYLEVFKDYQRKHPREAGDYSVYEFLSKKENHFIWRNHPEYPYLYATFCEIDKKKKDAKQQATFTLADPINHPLWVRFEERSGSNLNKYRILTEQLHTEKLKKKLTVQLDRLIYPTESGGWEEKGKVDIVLLPSRQFYNQIFLDIEEKGKHAFTYKDESIKFPLKGTLGGARVQFDRDHLRRYPHKVESGNVGRIYFNMTVNIEPTESPVSKSLKIHRDDFPKVVNFKPKELTEWIKDSKGKKLKSGIESLEIGLRVMSIDLGQRQAAAASIFEVVDQKPDIEGKLFFPIKGTELYAVHRASFNIKLPGETLVKSREVLRKAREDNLKLMNQKLNFLRNVLHFQQFEDITEREKRVTKWISRQENSDVPLVYQDELIQIRELMYKPYKDWVAFLKQLHKRLEVEIGKEVKHWRKSLSDGRKGLYGISLKNIDEIDRTRKFLLRWSLRPTEPGEVRRLEPGQRFAIDQLNHLNALKEDRLKKMANTIIMHALGYCYDVRKKKWQAKNPACQIILFEDLSNYNPYEERSRFENSKLMKWSRREIPRQVALQGEIYGLQVGEVGAQFSSRFHAKTGSPGIRCSVVTKEKLQDNRFFKNLQREGRLTLDKIAVLKEGDLYPDKGGEKFISLSKDRKCVTTHADINAAQNLQKRFWTRTHGFYKVYCKAYQVDGGSGGSSEVEFSHEYWMRHALTLAKRARDEREVPVGAVLVLNNRVIGEGWNRAIGLHDPTAHAEIMALRQGGLVMQNYRLYDATLYVTFEPCVMCAGAMIHSRIGRVVFGVRNAKTGAAGSLMDVLHHPGMNHRVEITEGILADECAALLCRFFRMPRRVFNAQKKAQSSTDGSSGSETPGTSESATPESSGGQTVYIPESKDQKQKIIEEFGEGYFILKDGVYEWVNAGKLKIKKGSSKQSSSELVDSDILKDSFDLASELKGEKLMLYRDPSGNVFPSDKWMAAGVFFGKLERILISKLTNQYSISTIEDDSSKQSMKRPAATKKAGQAKKKKGSYPYDVPDYAYPYDVPDYAYPYDVPDYA

SEQ ID NO: 10 - DNA, 4092 bp, synthetic construct
  misc_feature 1..4092: note = BhCas12b GGSGGS-ABE8-Xten20at K1019 polynucleotide sequence
  misc_feature 1..6: note = Kozak sequence
  misc_feature 7..57: note = Sequence encoding N-terminal nuclear localization signal (NLS)
  misc_feature 58..3114: note = Sequence encoding BhCas12b
  misc_feature 3115..3132: note = Sequence encoding a linker
  misc_feature 3133..3630: note = Sequence encoding TadA*8
  misc_feature 3631..3690: note = Sequence encoding Xten20 linker
  misc_feature 3691..3954: note = Sequence encoding BhCas12b
  misc_feature 3955..4002: note = Sequence encoding C-terminal NLS
  misc_feature 4003..4008: note = Sequence encoding GS linker
  misc_feature 4009..4089: note = Sequence encoding 3x hemagglutinin (HA) tag
  source 1..4092: mol_type = other DNA
gccaccatggccccaaagaagaagcggaaggtcggtatccacggagtcccagcagccgccaccagatccttcatcctgaagatcgagcccaacgaggaagtgaagaaaggcctctggaaaacccacgaggtgctgaaccacggaatcgcctactacatgaatatcctgaagctgatccggcaagaggccatctacgagcaccacgagcaggaccccaagaatcccaagaaggtgtccaaggccgagatccaggccgagctgtgggatttcgtgctgaagatgcagaagtgcaacagcttcacacacgaggtggacaaggacgaggtgttcaacatcctgagagagctgtacgaggaactggtgcccagcagcgtggaaaagaagggcgaagccaaccagctgagcaacaagtttctgtaccctctggtggaccccaacagccagtctggaaagggaacagccagcagcggcagaaagcccagatggtacaacctgaagattgccggcgatccctcctgggaagaagagaagaagaagtgggaagaagataagaaaaaggacccgctggccaagatcctgggcaagctggctgagtacggactgatccctctgttcatcccctacaccgacagcaacgagcccatcgtgaaagaaatcaagtggatggaaaagtcccggaaccagagcgtgcggcggctggataaggacatgttcattcaggccctggaacggttcctgagctgggagagctggaacctgaaagtgaaagaggaatacgagaaggtcgagaaagagtacaagaccctggaagagaggatcaaagaggacatccaggctctgaaggctctggaacagtatgagaaagagcggcaagaacagctgctgcgggacaccctgaacaccaacgagtaccggctgagcaagagaggccttagaggctggcgggaaatcatccagaaatggctgaaaatggacgagaacgagccctccgagaagtacctggaagtgttcaaggactaccagcggaagcaccctagagaggccggcgattacagcgtgtacgagttcctgtccaagaaagagaaccacttcatctggcggaatcaccctgagtacccctacctgtacgccaccttctgcgagatcgacaagaaaaagaaggacgccaagcagcaggccaccttcacactggccgatcctatcaatcaccctctgtgggtccgattcgaggaaagaagcggcagcaacctgaacaagtacagaatcctgaccgagcagctgcacaccgagaagctgaagaaaaagctgacagtgcagctggaccggctgatctaccctacagaatctggcggctgggaagagaagggcaaagtggacattgtgctgctgcccagccggcagttctacaaccagatcttcctggacatcgaggaaaagggcaagcacgccttcacctacaaggatgagagcatcaagttccctctgaagggcacactcggcggagccagagtgcagttcgacagagatcacctgagaagataccctcacaaggtggaaagcggcaacgtgggcagaatctacttcaacatgaccgtgaacatcgagcctacagagtccccagtgtccaagtctctgaagatccaccgggacgacttccccaaggtggtcaacttcaagcccaaagaactgaccgagtggatcaaggacagcaagggcaagaaactgaagtccggcatcgagtccctggaaatcggcctgagagtgatgagcatcgacctgggacagagacaggccgctgccgcctctattttcgaggtggtggatcagaagcccgacatcgaaggcaagctgtttttcccaatcaagggcaccgagctgtatgccgtgcacagagccagcttcaacatcaagctgcccggcgagacactggtcaagagcagagaagtgctgcggaaggccagagaggacaatctgaaactgatgaaccagaagctcaacttcctgcggaacgtgctgcacttccagcagttcgaggacatcaccgagagagagaagcgggtcaccaagtggatcagcagacaagagaacagcgacgtgcccctggtgtaccaggatgagctgatccagatccgcgagctgatgtacaagccttacaaggactgggtcgccttcctgaagcagctccacaagagactggaagtcgagatcggcaaagaagtgaagcactggcggaagtccctgagcgacggaagaaagggcctgtacggcatctccctgaagaacatcgacgagatcgatcggacccggaagttcctgctgagatggtccctgaggcctaccgaacctggcgaagtgcgtagactggaacccggccagagattcgccatcgaccagctgaatcacctgaacgccctgaaagaagatcggctgaagaagatggccaacaccatcatcatgcacgccctgggctactgctacgacgtgcggaagaagaaatggcaggctaagaaccccgcctgccagatcatcctgttcgaggatctgagcaactacaacccctacgaggaaaggtcccgcttcgagaacagcaagctcatgaagtggtccagacgcgagatccccagacaggttgcactgcagggcgagatctatggcctgcaagtgggagaagtgggcgctcagttcagcagcagattccacgccaagacaggcagccctggcatcagatgtagcgtcgtgaccaaagagaagctgcaggacaatcggttcttcaagaatctgcagagagagggcagactgaccctggacaaaatcgccgtgctgaaagagggcgatctgtacccagacaaaggcggcgagaagttcatcagcctgagcaaggatcggaagtgcgtgaccacacacgccgacatcaacgccgctcagaacctgcagaagcggttctggacaagaacccacggcttctacaaggtgtactgcaaggcctaccaggtggacggccagaccgtgtacatccctgagagcaaggaccagaagcagaagatcatcgaagagttcggcgagggctacttcattctgaaggacggggtgtacgaatgggtcaacgccggcaagggaggctctggaggaagctccgaagtcgagttttcccatgagtactggatgagacacgcattgactctcgcaaagagggctcgagatgaacgcgaggtgcccgtgggggcagtactcgtgctcaacaatcgcgtaatcggcgaaggttggaatagggcaatcggactccacgaccccactgcacatgcggaaatcatggcccttcgacagggagggcttgtgatgcagaattatcgactttatgatgcgacgctgtacgtcacgtttgaaccttgcgtaatgtgcgcgggagctatgattcactcccgcattggacgagttgtattcggtgttcgcaacgccaagacgggtgccgcaggttcactgatggacgtgctgcatcatccaggcatgaaccaccgggtagaaatcacagaaggcatattggcggacgaatgtgcggcgctgttgtgtcgtttttttcgcatgcccaggcgggtctttaacgcccagaaaaaagcacaatcctctactgacggctcttctggatctgaaacacctggcacaagcgagagcgccacccctgagagctctggcctgaaaatcaagaagggcagctccaagcagagcagcagcgagctggtggatagcgacatcctgaaagacagcttcgacctggcctccgagctgaaaggcgaaaagctgatgctgtacagggaccccagcggcaatgtgttccccagcgacaaatggatggccgctggcgtgttcttcggaaagctggaacgcatcctgatcagcaagctgaccaaccagtactccatcagcaccatcgaggacgacagcagcaagcagtctatgaaaaggccggcggccacgaaaaaggccggccaggcaaaaaagaaaaagggatcctacccatacgatgttccagattacgcttatccctacgacgtgcctgattatgcatacccatatgatgtccccgactatgcctaa

SEQ ID NO: 11 - protein, 1361 aa, synthetic construct
  REGION 1..1361: note = BhCas12b GGSGGS-ABE8-Xten20at K1019 polypeptide sequence
MAPKKKRKVGIHGVPAAATRSFILKIEPNEEVKKGLWKTHEVLNHGIAYYMNILKLIRQEAIYEHHEQDPKNPKKVSKAEIQAELWDFVLKMQKCNSFTHEVDKDEVFNILRELYEELVPSSVEKKGEANQLSNKFLYPLVDPNSQSGKGTASSGRKPRWYNLKIAGDPSWEEEKKKWEEDKKKDPLAKILGKLAEYGLIPLFIPYTDSNEPIVKEIKWMEKSRNQSVRRLDKDMFIQALERFLSWESWNLKVKEEYEKVEKEYKTLEERIKEDIQALKALEQYEKERQEQLLRDTLNTNEYRLSKRGLRGWREIIQKWLKMDENEPSEKYLEVFKDYQRKHPREAGDYSVYEFLSKKENHFIWRNHPEYPYLYATFCEIDKKKKDAKQQATFTLADPINHPLWVRFEERSGSNLNKYRILTEQLHTEKLKKKLTVQLDRLIYPTESGGWEEKGKVDIVLLPSRQFYNQIFLDIEEKGKHAFTYKDESIKFPLKGTLGGARVQFDRDHLRRYPHKVESGNVGRIYFNMTVNIEPTESPVSKSLKIHRDDFPKVVNFKPKELTEWIKDSKGKKLKSGIESLEIGLRVMSIDLGQRQAAAASIFEVVDQKPDIEGKLFFPIKGTELYAVHRASFNIKLPGETLVKSREVLRKAREDNLKLMNQKLNFLRNVLHFQQFEDITEREKRVTKWISRQENSDVPLVYQDELIQIRELMYKPYKDWVAFLKQLHKRLEVEIGKEVKHWRKSLSDGRKGLYGISLKNIDEIDRTRKFLLRWSLRPTEPGEVRRLEPGQRFAIDQLNHLNALKEDRLKKMANTIIMHALGYCYDVRKKKWQAKNPACQIILFEDLSNYNPYEERSRFENSKLMKWSRREIPRQVALQGEIYGLQVGEVGAQFSSRFHAKTGSPGIRCSVVTKEKLQDNRFFKNLQREGRLTLDKIAVLKEGDLYPDKGGEKFISLSKDRKCVTTHADINAAQNLQKRFWTRTHGFYKVYCKAYQVDGQTVYIPESKDQKQKIIEEFGEGYFILKDGVYEWVNAGKGGSGGSSEVEFSHEYWMRHALTLAKRARDEREVPVGAVLVLNNRVIGEGWNRAIGLHDPTAHAEIMALRQGGLVMQNYRLYDATLYVTFEPCVMCAGAMIHSRIGRVVFGVRNAKTGAAGSLMDVLHHPGMNHRVEITEGILADECAALLCRFFRMPRRVFNAQKKAQSSTDGSSGSETPGTSESATPESSGLKIKKGSSKQSSSELVDSDILKDSFDLASELKGEKLMLYRDPSGNVFPSDKWMAAGVFFGKLERILISKLTNQYSISTIEDDSSKQSMKRPAATKKAGQAKKKKGSYPYDVPDYAYPYDVPDYAYPYDVPDYA

SEQ ID NO: 12 - protein, 208 aa, Petromyzon marinus
  REGION 1..208: note = MISC_FEATURE - tr|A5H718|A5H718_PETMA Cytosine deaminase OS=Petromyzon marinusOX=7757 PE=2 SV=1 amino acid sequence; PmCDA1 polypeptide sequence
MTDAEYVRIHEKLDIYTFKKQFFNNKKSVSHRCYVLFELKRRGERRACFWGYAVNKPQSGTERGIHAEIFSIRKVEEYLRDNPGQFTINWYSSWSPCADCAEKILEWYNQELRGNGHTLKIWACKLYYEKNARNQIGLWNLRDNGVGLNVMVSEHYQCCRKIFIQSSHNQLNENRWLEKTLKRAEKRRSELSIMIQVKILHTTKSPAV

SEQ ID NO: 13 - DNA, 766 bp, Petromyzon marinus
  misc_feature 1..766: note = EF094822.1 Petromyzon marinus isolate PmCDA.21 cytosine deaminase mRNA, complete cds; PmCDA1 polynucleotide sequence
  source 1..766: mol_type = genomic DNA
tgacacgacacagccgtgtatatgaggaagggtagctggatggggggggggggaatacgttcagagaggacattagcgagcgtcttgttggtggccttgagtctagacacctgcagacatgaccgacgctgagtacgtgagaatccatgagaagttggacatctacacgtttaagaaacagtttttcaacaacaaaaaatccgtgtcgcatagatgctacgttctctttgaattaaaacgacggggtgaacgtagagcgtgtttttggggctatgctgtgaataaaccacagagcgggacagaacgtggaattcacgccgaaatctttagcattagaaaagtcgaagaatacctgcgcgacaaccccggacaattcacgataaattggtactcatcctggagtccttgtgcagattgcgctgaaaagatcttagaatggtataaccaggagctgcgggggaacggccacactttgaaaatctgggcttgcaaactctattacgagaaaaatgcgaggaatcaaattgggctgtggaacctcagagataacggggttgggttgaatgtaatggtaagtgaacactaccaatgttgcaggaaaatattcatccaatcgtcgcacaatcaattgaatgagaatagatggcttgagaagactttgaagcgagctgaaaaacgacggagcgagttgtccattatgattcaggtaaaaatactccacaccactaagagtcctgctgtttaagaggctatgcggatggttttc

SEQ ID NO: 14 - protein, 145 aa, Homo sapiens
  REGION 1..145: note = MISC_FEATURE - tr|Q6QJ80|Q6QJ80_HUMAN Activation-induced cytidine deaminase OS=Homo sapiens; OX = 9606 GN=AICDA PE=2 SV=1; AID polypeptide sequence
MDSLLMNRRKFLYQFKNVRWAKGRRETYLCYVVKRRDSATSFSLDFGYLRNKNGCHVELLFLRYISDWDLDPGRCYRVTWFTSWSPCYDCARHVADFLRGNPNLSLRIFTARLYFCEDRKAEPEGLRRLHRAGVQIAIMTFKAPV

SEQ ID NO: 15 - DNA, 10681 bp, Homo sapiens
  misc_feature 1..10681: note = NG_011588.1:5001-15681 Homo sapiens activation induced cytidine deaminase (AICDA), RefSeqGene (LRG_17) on chromosome 12; nucleic acid sequence of the CDS of human AID; polynucleotide sequence
  source 1..10681: mol_type = genomic DNA
agagaaccatcattaattgaagtgagatttttctggcctgagacttgcagggaggcaagaagacactctggacaccactatggacaggtaaagaggcagtcttctcgtgggtgattgcactggccttcctctcagagcaaatctgagtaatgagactggtagctatccctttctctcatgtaactgtctgactgataagatcagcttgatcaatatgcatatatattttttgatctgtctccttttcttctattcagatcttatacgctgtcagcccaattctttctgtttcagacttctcttgatttccctctttttcatgtggcaaaagaagtagtgcgtacaatgtactgattcgtcctgagatttgtaccatggttgaaactaatttatggtaataatattaacatagcaaatctttagagactcaaatcatgaaaaggtaatagcagtactgtactaaaaacggtagtgctaattttcgtaataattttgtaaatattcaacagtaaaacaacttgaagacacactttcctagggaggcgttactgaaataatttagctatagtaagaaaatttgtaattttagaaatgccaagcattctaaattaattgcttgaaagtcactatgattgtgtccattataaggagacaaattcattcaagcaagttatttaatgttaaaggcccaattgttaggcagttaatggcacttttactattaactaatctttccatttgttcagacgtagcttaacttacctcttaggtgtgaatttggttaaggtcctcataatgtctttatgtgcagtttttgataggttattgtcatagaacttattctattcctacatttatgattactatggatgtatgagaataacacctaatccttatactttacctcaatttaactcctttataaagaacttacattacagaataaagattttttaaaaatatatttttttgtagagacagggtcttagcccagccgaggctggtctctaagtcctggcccaagcgatcctcctgcctgggcctcctaaagtgctggaattatagacatgagccatcacatccaatatacagaataaagatttttaatggaggatttaatgttcttcagaaaattttcttgaggtcagacaatgtcaaatgtctcctcagtttacactgagattttgaaaacaagtctgagctataggtccttgtgaagggtccattggaaatacttgttcaaagtaaaatggaaagcaaaggtaaaatcagcagttgaaattcagagaaagacagaaaaggagaaaagatgaaattcaacaggacagaagggaaatatattatcattaaggaggacagtatctgtagagctcattagtgatggcaaaatgacttggtcaggattatttttaacccgcttgtttctggtttgcacggctggggatgcagctagggttctgcctcagggagcacagctgtccagagcagctgtcagcctgcaagcctgaaacactccctcggtaaagtccttcctactcaggacagaaatgacgagaacagggagctggaaacaggcccctaaccagagaagggaagtaatggatcaacaaagttaactagcaggtcaggatcacgcaattcatttcactctgactggtaacatgtgacagaaacagtgtaggcttattgtattttcatgtagagtaggacccaaaaatccacccaaagtcctttatctatgccacatccttcttatctatacttccaggacactttttcttccttatgataaggctctctctctctccacacacacacacacacacacacacacacacacacacacacacacaaacacacaccccgccaaccaaggtgcatgtaaaaagatgtagattcctctgcctttctcatctacacagcccaggagggtaagttaatataagagggatttattggtaagagatgatgcttaatctgtttaacactgggcctcaaagagagaatttcttttcttctgtacttattaagcacctattatgtgttgagcttatatatacaaagggttattatatgctaatatagtaatagtaatggtggttggtactatggtaattaccataaaaattattatccttttaaaataaagctaattattattggatcttttttagtattcattttatgttttttatgtttttgattttttaaaagacaatctcaccctgttacccaggctggagtgcagtggtgcaatcatagctttctgcagtcttgaactcctgggctcaagcaatcctcctgccttggcctcccaaagtgttgggatacagtcatgagccactgcatctggcctaggatccatttagattaaaatatgcattttaaattttaaaataatatggctaatttttaccttatgtaatgtgtatactggcaataaatctagtttgctgcctaaagtttaaagtgctttccagtaagcttcatgtacgtgaggggagacatttaaagtgaaacagacagccaggtgtggtggctcacgcctgtaatcccagcactctgggaggctgaggtgggtggatcgcttgagccctggagttcaagaccagcctgagcaacatggcaaaacgctgtttctataacaaaaattagccgggcatggtggcatgtgcctgtggtcccagctactagggggctgaggcaggagaatcgttggagcccaggaggtcaaggctgcactgagcagtgcttgcgccactgcactccagcctgggtgacaggaccagaccttgcctcaaaaaaataagaagaaaaattaaaaataaatggaaacaactacaaagagctgttgtcctagatgagctacttagttaggctgatattttggtatttaacttttaaagtcagggtctgtcacctgcactacattattaaaatatcaattctcaatgtatatccacacaaagactggtacgtgaatgttcatagtacctttattcacaaaaccccaaagtagagactatccaaatatccatcaacaagtgaacaaataaacaaaatgtgctatatccatgcaatggaataccaccctgcagtacaaagaagctacttggggatgaatcccaaagtcatgacgctaaatgaaagagtcagacatgaaggaggagataatgtatgccatacgaaattctagaaaatgaaagtaacttatagttacagaaagcaaatcagggcaggcatagaggctcacacctgtaatcccagcactttgagaggccacgtgggaagattgctagaactcaggagttcaagaccagcctgggcaacacagtgaaactccattctccacaaaaatgggaaaaaaagaaagcaaatcagtggttgtcctgtggggaggggaaggactgcaaagagggaagaagctctggtggggtgagggtggtgattcaggttctgtatcctgactgtggtagcagtttggggtgtttacatccaaaaatattcgtagaattatgcatcttaaatgggtggagtttactgtatgtaaattatacctcaatgtaagaaaaaataatgtgtaagaaaactttcaattctcttgccagcaaacgttattcaaattcctgagccctttacttcgcaaattctctgcacttctgccccgtaccattaggtgacagcactagctccacaaattggataaatgcatttctggaaaagactagggacaaaatccaggcatcacttgtgctttcatatcaaccatgctgtacagcttgtgttgctgtctgcagctgcaatggggactcttgatttctttaaggaaacttgggttaccagagtatttccacaaatgctattcaaattagtgcttatgatatgcaagacactgtgctaggagccagaaaacaaagaggaggagaaatcagtcattatgtgggaacaacatagcaagatatttagatcattttgactagttaaaaaagcagcagagtacaaaatcacacatgcaatcagtataatccaaatcatgtaaatatgtgcctgtagaaagactagaggaataaacacaagaatcttaacagtcattgtcattagacactaagtctaattattattattagacactatgatatttgagatttaaaaaatctttaatattttaaaatttagagctcttctatttttccatagtattcaagtttgacaatgatcaagtattactctttctttttttttttttttttttttttttgagatggagttttggtcttgttgcccatgctggagtggaatggcatgaccatagctcactgcaacctccacctcctgggttcaagcaaagctgtcgcctcagcctcccgggtagatgggattacaggcgcccaccaccacactcggctaatgtttgtatttttagtagagatggggtttcaccatgttggccaggctggtctcaaactcctgacctcagaggatccacctgcctcagcctcccaaagtgctgggattacagatgtaggccactgcgcccggccaagtattgctcttatacattaaaaaacaggtgtgagccactgcgcccagccaggtattgctcttatacattaaaaaataggccggtgcagtggctcacgcctgtaatcccagcactttgggaagccaaggcgggcagaacacccgaggtcaggagtccaaggccagcctggccaagatggtgaaaccccgtctctattaaaaatacaaacattacctgggcatgatggtgggcgcctgtaatcccagctactcaggaggctgaggcaggaggatccgcggagcctggcagatctgcctgagcctgggaggttgaggctacagtaagccaagatcatgccagtatacttcagcctgggcgacaaagtgagaccgtaacaaaaaaaaaaaaatttaaaaaaagaaatttagatcaagatccaactgtaaaaagtggcctaaacaccacattaaagagtttggagtttattctgcaggcagaagagaaccatcagggggtcttcagcatgggaatggcatggtgcacctggtttttgtgagatcatggtggtgacagtgtggggaatgttattttggagggactggaggcagacagaccggttaaaaggccagcacaacagataaggaggaagaagatgagggcttggaccgaagcagagaagagcaaacagggaaggtacaaattcaagaaatattggggggtttgaatcaacacatttagatgattaattaaatatgaggactgaggaataagaaatgagtcaaggatggttccaggctgctaggctgcttacctgaggtggcaaagtcgggaggagtggcagtttaggacagggggcagttgaggaatattgttttgatcattttgagtttgaggtacaagttggacacttaggtaaagactggaggggaaatctgaatatacaattatgggactgaggaacaagtttattttattttttgtttcgttttcttgttgaagaacaaatttaattgtaatcccaagtcatcagcatctagaagacagtggcaggaggtgactgtcttgtgggtaagggtttggggtccttgatgagtatctctcaattggccttaaatataagcaggaaaaggagtttatgatggattccaggctcagcagggctcaggagggctcaggcagccagcagaggaagtcagagcatcttctttggtttagcccaagtaatgacttccttaaaaagctgaaggaaaatccagagtgaccagattataaactgtactcttgcattttctctccctcctctcacccacagcctcttgatgaaccggaggaagtttctttaccaattcaaaaatgtccgctgggctaagggtcggcgtgagacctacctgtgctacgtagtgaagaggcgtgacagtgctacatccttttcactggactttggttatcttcgcaataaggtatcaattaaagtcggctttgcaagcagtttaatggtcaactgtgagtgcttttagagccacctgctgatggtattacttccatccttttttggcatttgtgtctctatcacattcctcaaatccttttttttatttctttttccatgtccatgcacccatattagacatggcccaaaatatgtgatttaattcctccccagtaatgctgggcaccctaataccactccttccttcagtgccaagaacaactgctcccaaactgtttaccagctttcctcagcatctgaattgcctttgagattaattaagctaaaagcatttttatatgggagaatattatcagcttgtccaagcaaaaattttaaatgtgaaaaacaaattgtgtcttaagcatttttgaaaattaaggaagaagaatttgggaaaaaattaacggtggctcaattctgtcttccaaatgatttcttttccctcctactcacatgggtcgtaggccagtgaatacattcaacatggtgatccccagaaaactcagagaagcctcggctgatgattaattaaattgatctttcggctacccgagagaattacatttccaagagacttcttcaccaaaatccagatgggtttacataaacttctgcccacgggtatctcctctctcctaacacgctgtgacgtctgggcttggtggaatctcagggaagcatccgtggggtggaaggtcatcgtctggctcgttgtttgatggttatattaccatgcaattttctttgcctacatttgtattgaatacatcccaatctccttcctattcggtgacatgacacattctatttcagaaggctttgattttatcaagcactttcatttacttctcatggcagtgcctattacttctcttacaatacccatctgtctgctttaccaaaatctatttccccttttcagatcctcccaaatggtcctcataaactgtcctgcctccacctagtggtccaggtatatttccacaatgttacatcaacaggcacttctagccattttccttctcaaaaggtgcaaaaagcaacttcataaacacaaattaaatcttcggtgaggtagtgtgatgctgcttcctcccaactcagcgcacttcgtcttcctcattccacaaaaacccatagccttccttcactctgcaggactagtgctgccaagggttcagctctacctactggtgtgctcttttgagcaagttgcttagcctctctgtaacacaaggacaatagctgcaagcatccccaaagatcattgcaggagacaatgactaaggctaccagagccgcaataaaagtcagtgaattttagcgtggtcctctctgtctctccagaacggctgccacgtggaattgctcttcctccgctacatctcggactgggacctagaccctggccgctgctaccgcgtcacctggttcacctcctggagcccctgctacgactgtgcccgacatgtggccgactttctgcgagggaaccccaacctcagtctgaggatcttcaccgcgcgcctctacttctgtgaggaccgcaaggctgagcccgaggggctgcggcggctgcaccgcgccggggtgcaaatagccatcatgaccttcaaaggtgcgaaagggccttccgcgcaggcgcagtgcagcagcccgcattcgggattgcgatgcggaatgaatgagttagtggggaagctcgaggggaagaagtgggcggggattctggttcacctctggagccgaaattaaagattagaagcagagaaaagagtgaatggctcagagacaaggccccgaggaaatgagaaaatggggccagggttgcttctttcccctcgatttggaacctgaactgtcttctacccccatatccccgcctttttttcctttttttttttttgaagattatttttactgctggaatacttttgtagaaaaccacgaaagaactttcaaagcctgggaagggctgcatgaaaattcagttcgtctctccagacagcttcggcgcatccttttggtaaggggcttcctcgctttttaaattttctttctttctctacagtcttttttggagtttcgtatatttcttatattttcttattgttcaatcactctcagttttcatctgatgaaaactttatttctcctccacatcagctttttcttctgctgtttcaccattcagagccctctgctaaggttccttttccctcccttttctttcttttgttgtttcacatctttaaatttctgtctctccccagggttgcgtttccttcctggtcagaattcttttctcctttttttttttttttttttttttttttaaacaaacaaacaaaaaacccaaaaaaactctttcccaatttactttcttccaacatgttacaaagccatccactcagtttagaagactctccggccccaccgacccccaacctcgttttgaagccattcactcaatttgcttctctctttctctacagcccctgtatgaggttgatgacttacgagacgcatttcgtactttgggactttgatagcaacttccaggaatgtcacacacgatgaaatatctctgctgaagacagtggataaaaaacagtccttcaagtcttctctgtttttattcttcaactctcactttcttagagtttacagaaaaaatatttatatacgactctttaaaaagatctatgtcttgaaaatagagaaggaacacaggtctggccagggacgtgctgcaattggtgcagttttgaatgcaacattgtcccctactgggaataacagaactgcaggacctgggagcatcctaaagtgtcaacgtttttctatgacttttaggtaggatgagagcagaaggtagatcctaaaaagcatggtgagaggatcaaatgtttttatatcaacatcctttattatttgattcatttgagttaacagtggtgttagtgatagatttttctattcttttcccttgacgtttactttcaagtaacacaaactcttccatcaggccatgatctataggacctcctaatgagagtatctgggtgattgtgaccccaaaccatctctccaaagcattaatatccaatcatgcgctgtatgttttaatcagcagaagcatgtttttatgtttgtacaaaagaagattgttatgggtggggatggaggtatagaccatgcatggtcaccttcaagctactttaataaaggatcttaaaatgggcaggaggactgtgaacaagacaccctaataatgggttgatgtctgaagtagcaaatcttctggaaacgcaaactcttttaaggaagtccctaatttagaaacacccacaaacttcacatatcataattagcaaacaattggaaggaagttgcttgaatgttggggagaggaaaatctattggctctcgtgggtctcttcatctcagaaatgccaatcaggtcaaggtttgctacattttgtatgtgtgtgatgcttctcccaaaggtatattaactatataagagagttgtgacaaaacagaatgataaagctgcgaaccgtggcacacgctcatagttctagctgcttgggaggttgaggagggaggatggcttgaacacaggtgttcaaggccagcctgggcaacataacaagatcctgtctctcaaaaaaaaaaaaaaaaaaaagaaagagagagggccgggcgtggtggctcacgcctgtaatcccagcactttgggaggccgagccgggcggatcacctgtggtcaggagtttgagaccagcctggccaacatggcaaaaccccgtctgtactcaaaatgcaaaaattagccaggcgtggtagcaggcacctgtaatcccagctacttgggaggctgaggcaggagaatcgcttgaacccaggaggtggaggttgcagtaagctgagatcgtgccgttgcactccagcctgggcgacaagagcaagactctgtctcagaaaaaaaaaaaaaaaagagagagagagagaaagagaacaatatttgggagagaaggatggggaagcattgcaaggaaattgtgctttatccaacaaaatgtaaggagccaataagggatccctatttgtctcttttggtgtctatttgtccctaacaactgtctttgacagtgagaaaaatattcagaataaccatatccctgtgccgttattacctagcaacccttgcaatgaagatgagcagatccacaggaaaacttgaatgcacaactgtcttattttaatcttattgtacataagtttgtaaaagagttaaaaattgttacttcatgtattcatttatattttatattattttgcgtctaatgattttttattaacatgatttccttttctgatatattgaaatggagtctcaaagcttcataaatttataactttagaaatgattctaataacaacgtatgtaattgtaacattgcagtaatggtgctacgaagccatttctcttgatttttagtaaacttttatgacagcaaatttgcttctggctcactttcaatcagttaaataaatgataaataattttggaagctgtgaagataaaataccaaataaaataatataaaagtgatttatatgaagttaaaataaaaaatcagtatgatggaataaacttg

SEQ ID NO: 16 - protein, 198 aa, Homo sapiens [sequence omitted]

SEQ ID NO: 17 - protein, 198 aa, Canis lupus
  REGION 1..198: note = MISC_FEATURE - Canine AID (clAID) polypeptide sequence
  REGION 1..30: note = MISC_FEATURE - Nuclear localization sequence
  REGION 183..198: note = MISC_FEATURE - Nuclear export signal
MDSLLMKQRKFLYHFKNVRWAKGRHETYLCYVVKRRDSATSFSLDFGHLRNKSGCHVELLFLRYISDWDLDPGRCYRVTWFTSWSPCYDCARHVADFLRGYPNLSLRIFAARLYFCEDRKAEPEGLRRLHRAGVQIAIMTFKDYFYCWNTFVENREKTFKAWEGLHENSVRLSRQLRRILLPLYEVDDLRDAFRTLGL

SEQ ID NO: 18 - protein, 199 aa, Bos taurus
  REGION 1..199: note = MISC_FEATURE - Bovine AID (btAID) polypeptide sequence
  REGION 1..30: note = MISC_FEATURE - Nuclear localization sequence
  REGION 183..199: note = MISC_FEATURE - Nuclear export signal
MDSLLKKQRQFLYQFKNVRWAKGRHETYLCYVVKRRDSPTSFSLDFGHLRNKAGCHVELLFLRYISDWDLDPGRCYRVTWFTSWSPCYDCARHVADFLRGYPNLSLRIFTARLYFCDKERKAEPEGLRRLHRAGVQIAIMTFKDYFYCWNTFVENHERTFKAWEGLHENSVRLSRQLRRILLPLYEVDDLRDAFRTLGL

SEQ ID NO: 19 - protein, 239 aa, Rattus sp.
  REGION 1..239: note = MISC_FEATURE - Rat AID polypeptide sequence
  REGION 1..26: note = MISC_FEATURE - Nuclear localization sequence
  REGION 194..239: note = MISC_FEATURE - Nuclear export signal
MAVGSKPKAALVGPHWERERIWCFLCSTGLGTQQTGQTSRWLRPAATQDPVSPPRSLLMKQRKFLYHFKNVRWAKGRHETYLCYVVKRRDSATSFSLDFGYLRNKSGCHVELLFLRYISDWDLDPGRCYRVTWFTSWSPCYDCARHVADFLRGNPNLSLRIFTARLTGWGALPAGLMSPARPSDYFYCWNTFVENHERTFKAWEGLHENSVRLSRRLRRILLPLYEVDDLRDAFRTLGL

SEQ ID NO: 20 - protein, 198 aa, Mus musculus [sequence omitted]

SEQ ID NO: 21 - protein, 229 aa, Rattus norvegicus [sequence omitted]

SEQ ID NO: 22 - protein, 229 aa, Mesocricetus auratus
  REGION 1..229: note = MISC_FEATURE - maAPOBEC-1 polypeptide sequence
MSSETGPVVVDPTLRRRIEPHEFDAFFDQGELRKETCLLYEIRWGGRHNIWRHTGQNTSRHVEINFIEKFTSERYFYPSTRCSIVWFLSWSPCGECSKAITEFLSGHPNVTLFIYAARLYHHTDQRNRQGLRDLISRGVTIRIMTEQEYCYCWRNFVNYPPSNEVYWPRYPNLWMRLYALELYCIHLGLPPCLKIKRRHQYPLTFFRLNLQSCHYQRIPPHILWATGFI

SEQ ID NO: 23 - protein, 236 aa, Pongo pygmaeus
  REGION 1..236: note = MISC_FEATURE - ppAPOBEC-1 polypeptide sequence
MTSEKGPSTGDPTLRRRIESWEFDVFYDPRELRKETCLLYEIKWGMSRKIWRSSGKNTTNHVEVNFIKKFTSERRFHSSISCSITWFLSWSPCWECSQAIREFLSQHPGVTLVIYVARLFWHMDQRNRQGLRDLVNSGVTIQIMRASEYYHCWRNFVNYPPGDEAHWPQYPPLWMMLYALELHCIILSLPPCLKISRRWQNHLAFFRLHLQNCHYQTIPPHILLATGLIHPSVTWR

SEQ ID NO: 24 - protein, 236 aa, Oryctolagus cuniculus
  REGION 1..236: note = MISC_FEATURE - ocAPOBEC1 polypeptide sequence
MASEKGPSNKDYTLRRRIEPWEFEVFFDPQELRKEACLLYEIKWGASSKTWRSSGKNTTNHVEVNFLEKLTSEGRLGPSTCCSITWFLSWSPCWECSMAIREFLSQHPGVTLIIFVARLFQHMDRRNRQGLKDLVTSGVTVRVMSVSEYCYCWENFVNYPPGKAAQWPRYPPRWMLMYALELYCIILGLPPCLKISRRHQKQLTFFSLTPQYCHYKMIPPYILLATGLLQPSVPWR

SEQ ID NO: 25 - protein, 235 aa, Monodelphis domestica
  REGION 1..235: note = MISC_FEATURE - mdAPOBEC-1 polypeptide sequence
MNSKTGPSVGDATLRRRIKPWEFVAFFNPQELRKETCLLYEIKWGNQNIWRHSNQNTSQHAEINFMEKFTAERHFNSSVRCSITWFLSWSPCWECSKAIRKFLDHYPNVTLAIFISRLYWHMDQQHRQGLKELVHSGVTIQIMSYSEYHYCWRNFVDYPQGEEDYWPKYPYLWIMLYVLELHCIILGLPPCLKISGSHSNQLALFSLDLQDCHYQKIPYNVLVATGLVQPFVTWR

SEQ ID NO: 26 - protein, 224 aa, Pongo pygmaeus
  REGION 1..224: note = MISC_FEATURE - ppAPOBEC-2 polypeptide sequence
MAQKEEAAAATEAASQNGEDLENLDDPEKLKELIELPPFEIVTGERLPANFFKFQFRNVEYSSGRNKTFLCYVVEAQGKGGQVQASRGYLEDEHAAAHAEEAFFNTILPAFDPALRYNVTWYVSSSPCAACADRIIKTLSKTKNLRLLILVGRLFMWEELEIQDALKKLKEAGCKLRIMKPQDFEYVWQNFVEQEEGESKAFQPWEDIQENFLYYEEKLADILK

SEQ ID NO: 27 - protein, 224 aa, Bos taurus
  REGION 1..224: note = MISC_FEATURE - btAPOBEC-2 polypeptide sequence
MAQKEEAAAAAEPASQNGEEVENLEDPEKLKELIELPPFEIVTGERLPAHYFKFQFRNVEYSSGRNKTFLCYVVEAQSKGGQVQASRGYLEDEHATNHAEEAFFNSIMPTFDPALRYMVTWYVSSSPCAACADRIVKTLNKTKNLRLLILVGRLFMWEEPEIQAALRKLKEAGCRLRIMKPQDFEYIWQNFVEQEEGESKAFEPWEDIQENFLYYEEKLADILK

SEQ ID NO: 28 - protein, 440 aa, Mus musculus
  REGION 1..440: note = MISC_FEATURE - mAPOBEC-3-(1) polypeptide sequence
MQPQRLGPRAGMGPFCLGCSHRKCYSPIRNLISQETFKFHFKNLGYAKGRKDTFLCYEVTRKDCDSPVSLHHGVFKNKDNIHAEICFLYWFHDKVLKVLSPREEFKITWYMSWSPCFECAEQIVRFLATHHNLSLDIFSSRLYNVQDPETQQNLCRLVQEGAQVAAMDLYEFKKCWKKFVDNGGRRFRPWKRLLTNFRYQDSKLQEILRPCYISVPSSSSSTLSNICLTKGLPETRFWVEGRRMDPLSEEEFYSQFYNQRVKHLCYYHRMKPYLCYQLEQFNGQAPLKGCLLSEKGKQHAEILFLDKIRSMELSQVTITCYLTWSPCPNCAWQLAAFKRDRPDLILHIYTSRLYFHWKRPFQKGLCSLWQSGILVDVMDLPQFTDCWTNFVNPKRPFWPWKGLEIISRRTQRRLRRIKESWGLQDLVNDFGNLQLGPPMS

SEQ ID NO: 29 - protein, 429 aa, Mus musculus
  REGION 1..429: note = MISC_FEATURE - APOBEC-3-(2) (Mouse APOBEC-3) polypeptide sequence
  REGION 71..108: note = MISC_FEATURE - Nucleic acid editing domain
  REGION 288..319: note = MISC_FEATURE - Nucleic acid editing domain
MGPFCLGCSHRKCYSPIRNLISQETFKFHFKNLGYAKGRKDTFLCYEVTRKDCDSPVSLHHGVFKNKDNIHAEICFLYWFHDKVLKVLSPREEFKITWYMSWSPCFECAEQIVRFLATHHNLSLDIFSSRLYNVQDPETQQNLCRLVQEGAQVAAMDLYEFKKCWKKFVDNGGRRFRPWKRLLTNFRYQDSKLQEILRPCYIPVPSSSSSTLSNICLTKGLPETRFCVEGRRMDPLSEEEFYSQFYNQRVKHLCYYHRMKPYLCYQLEQFNGQAPLKGCLLSEKGKQHAEILFLDKIRSMELSQVTITCYLTWSPCPNCAWQLAAFKRDRPDLILHIYTSRLYFHWKRPFQKGLCSLWQSGILVDVMDLPQFTDCWTNFVNPKRPFWPWKGLEIISRRTQRRLRRIKESWGLQDLVNDFGNLQLGPPMS

SEQ ID NO: 30 - protein, 430 aa, Rattus sp.
  REGION 1..430: note = MISC_FEATURE - APOBEC-3 polypeptide sequence
  REGION 72..109: note = MISC_FEATURE - Nucleic acid editing domain
  REGION 289..320: note = MISC_FEATURE - Nucleic acid editing domain
MGPFCLGCSHRKCYSPIRNLISQETFKFHFKNRLRYAIDRKDTFLCYEVTRKDCDSPVSLHHGVFKNKDNIHAEICFLYWFHDKVLKVLSPREEFKITWYMSWSPCFECAEQVLRFLATHHNLSLDIFSSRLYNIRDPENQQNLCRLVQEGAQVAAMDLYEFKKCWKKFVDNGGRRFRPWKKLLTNFRYQDSKLQEILRPCYIPVPSSSSSTLSNICLTKGLPETRFCVERRRVHLLSEEEFYSQFYNQRVKHLCYYHGVKPYLCYQLEQFNGQAPLKGCLLSEKGKQHAEILFLDKIRSMELSQVIITCYLTWSPCPNCAWQLAAFKRDRPDLILHIYTSRLYFHWKRPFQKGLCSLWQSGILVDVMDLPQFTDCWTNFVNPKRPFWPWKGLEIISRRTQRRLHRIKESWGLQDLVNDFGNLQLGPPMS

SEQ ID NO: 31 - protein, 199 aa, Homo sapiens
  REGION 1..199: note = MISC_FEATURE - hAPOBEC-3A polypeptide sequence
  REGION 70..106: note = MISC_FEATURE - Nucleic acid editing domain
MEASPASGPRHLMDPHIFTSNFNNGIGRHKTYLCYEVERLDNGTSVKMDQHRGFLHNQAKNLLCGFYGRHAELRFLDLVPSLQLDPAQIYRVTWFISWSPCFSWGCAGEVRAFLQENTHVRLRIFAARIYDYDPLYKEALQMLRDAGAQVSIMTYDEFKHCWDTFVDHQGCPFQPWDGLDEHSQALSGRLRAILQNQGN

SEQ ID NO: 32 - protein, 373 aa, Homo sapiens
  REGION 1..373: note = MISC_FEATURE - hAPOBEC-3F polypeptide sequence
  REGION 65..99: note = MISC_FEATURE - Nucleic acid editing domain
  REGION 248..283: note = MISC_FEATURE - Nucleic acid editing domain
MKPHFRNTVERMYRDTFSYNFYNRPILSRRNTVWLCYEVKTKGPSRPRLDAKIFRGQVYSQPEHHAEMCFLSWFCGNQLPAYKCFQITWFVSWTPCPDCVAKLAEFLAEHPNVTLTISAARLYYYWERDYRRALCRLSQAGARVKIMDDEEFAYCWENFVYSEGQPFMPWYKFDDNYAFLHRTLKEILRNPMEAMYPHIFYFHFKNLRKAYGRNESWLCFTMEVVKHHSPVSWKRGVFRNQVDPETHCHAERCFLSWFCDDILSPNTNYEVTWYTSWSPCPECAGEVAEFLARHSNVNLTIFTARLYYFWDTDYQEGLRSLSQEGASVEIMGYKDFKYCWENFVYNDDEPFKPWKGLKYNFLFLDSKLQEILE

SEQ ID NO: 33 - protein, 370 aa, Macaca mulatta
  REGION 1..370: note = MISC_FEATURE - Rhesus macaque APOBEC-3G polypeptide sequence
  REGION 1..61: note = MISC_FEATURE - Cytoplasmic localization signal
MVEPMDPRTFVSNFNNRPILSGLNTVWLCCEVKTKDPSGPPLDAKIFQGKVYSKAKYHPEMRFLRWFHKWRQLHHDQEYKVTWYVSWSPCTRCANSVATFLAKDPKVTLTIFVARLYYFWKPDYQQALRILCQKRGGPHATMKIMNYNEFQDCWNKFVDGRGKPFKPRNNLPKHYTLLQATLGELLRHLMDPGTFTSNFNNKPWVSGQHETYLCYKVERLHNDTWVPLNQHRGFLRNQAPNIHGFPKGRHAELCFLDLIPFWKLDGQQYRVTCFTSWSPCFSCAQEMAKFISNNEHVSLCIFAARIYDDQGRYQEGLRALHRDGAKIAMMNYSEFEYCWDTFVDRQGRPFQPWDGLDEHSQALSGRLRAI

SEQ ID NO: 34 - protein, 384 aa, Pan troglodytes
  REGION 1..384: note = MISC_FEATURE - Chimpanzee APOBEC-3G polypeptide sequence
  REGION 1..60: note = MISC_FEATURE - Cytoplasmic localization signal
  REGION 65..100: note = MISC_FEATURE - Nucleic acid editing domain
  REGION 257..291: note = MISC_FEATURE - Nucleic acid editing domain
MKPHFRNPVERMYQDTFSDNFYNRPILSHRNTVWLCYEVKTKGPSRPPLDAKIFRGQVYSKLKYHPEMRFFHWFSKWRKLHRDQEYEVTWYISWSPCTKCTRDVATFLAEDPKVTLTIFVARLYYFWDPDYQEALRSLCQKRDGPRATMKIMNYDEFQHCWSKFVYSQRELFEPWNNLPKYYILLHIMLGEILRHSMDPPTFTSNFNNELWVRGRHETYLCYEVERLHNDTWVLLNQRRGFLCNQAPHKHGFLEGRHAELCFLDVIPFWKLDLHQDYRVTCFTSWSPCFSCAQEMAKFISNNKHVSLCIFAARIYDDQGRCQEGLRTLAKAGAKISIMTYSEFKHCWDTFVDHQGCPFQPWDGLEEHSQALSGRLRAILQNQGN

SEQ ID NO: 35 - protein, 377 aa, Chlorocebus sabaeus
  REGION 1..377: note = MISC_FEATURE - Green monkey APOBEC-3G polypeptide sequence
  REGION 1..60: note = MISC_FEATURE - Cytoplasmic localization signal
  REGION 65..100: note = MISC_FEATURE - Nucleic acid editing domain
  REGION 257..290: note = MISC_FEATURE - Nucleic acid editing domain
MNPQIRNMVEQMEPDIFVYYFNNRPILSGRNTVWLCYEVKTKDPSGPPLDANIFQGKLYPEAKDHPEMKFLHWFRKWRQLHRDQEYEVTWYVSWSPCTRCANSVATFLAEDPKVTLTIFVARLYYFWKPDYQQALRILCQERGGPHATMKIMNYNEFQHCWNEFVDGQGKPFKPRKNLPKHYTLLHATLGELLRHVMDPGTFTSNFNNKPWVSGQRETYLCYKVERSHNDTWVLLNQHRGFLRNQAPDRHGFPKGRHAELCFLDLIPFWKLDDQQYRVTCFTSWSPCFSCAQKMAKFISNNKHVSLCIFAARIYDDQGRCQEGLRTLHRDGAKIAVMNYSEFEYCWDTFVDRQGRPFQPWDGLDEHSQALSGRLRAI

SEQ ID NO: 36 - protein, 384 aa, Homo sapiens
  REGION 1..384: note = MISC_FEATURE - Human APOBEC-3G polypeptide sequence
  REGION 1..60: note = MISC_FEATURE - Cytoplasmic localization signal
  REGION 65..100: note = MISC_FEATURE - Nucleic acid editing domain
  REGION 257..291: note = MISC_FEATURE - Nucleic acid editing domain
MKPHFRNTVERMYRDTFSYNFYNRPILSRRNTVWLCYEVKTKGPSRPPLDAKIFRGQVYSELKYHPEMRFFHWFSKWRKLHRDQEYEVTWYISWSPCTKCTRDMATFLAEDPKVTLTIFVARLYYFWDPDYQEALRSLCQKRDGPRATMKIMNYDEFQHCWSKFVYSQRELFEPWNNLPKYYILLHIMLGEILRHSMDPPTFTFNFNNEPWVRGRHETYLCYEVERMHNDTWVLLNQRRGFLCNQAPHKHGFLEGRHAELCFLDVIPFWKLDLDQDYRVTCFTSWSPCFSCAQEMAKFISKNKHVSLCIFTARIYDDQGRCQEGLRTLAEAGAKISIMTYSEFKHCWDTFVDHQGCPFQPWDGLDEHSQDLSGRLRAILQNQEN

SEQ ID NO: 37 - protein, 382 aa, Homo sapiens
  REGION 1..382: note = MISC_FEATURE - Human APOBEC-3B polypeptide sequence
  REGION 66..100: note = MISC_FEATURE - Nucleic acid editing domain
  REGION 251..289: note = MISC_FEATURE - Nucleic acid editing domain
MNPQIRNPMERMYRDTFYDNFENEPILYGRSYTWLCYEVKIKRGRSNLLWDTGVFRGQVYFKPQYHAEMCFLSWFCGNQLPAYKCFQITWFVSWTPCPDCVAKLAEFLSEHPNVTLTISAARLYYYWERDYRRALCRLSQAGARVTIMDYEEFAYCWENFVYNEGQQFMPWYKFDENYAFLHRTLKEILRYLMDPDTFTFNFNNDPLVLRRRQTYLCYEVERLDNGTWVLMDQHMGFLCNEAKNLLCGFYGRHAELRFLDLVPSLQLDPAQIYRVTWFISWSPCFSWGCAGEVRAFLQENTHVRLRIFAARIYDYDPLYKEALQMLRDAGAQVSIMTYDEFEYCWDTFVYRQGCPFQPWDGLEEHSQALSGRLRAILQNQGN

SEQ ID NO: 38 - protein, 395 aa, Rattus sp.
  REGION 1..395: note = MISC_FEATURE - Rat APOBEC-3B polypeptide sequence
MQPQGLGPNAGMGPVCLGCSHRRPYSPIRNPLKKLYQQTFYFHFKNVRYAWGRKNNFLCYEVNGMDCALPVPLRQGVFRKQGHIHAELCFIYWFHDKVLRVLSPMEEFKVTWYMSWSPCSKCAEQVARFLAAHRNLSLAIFSSRLYYYLRNPNYQQKLCRLIQEGVHVAAMDLPEFKKCWNKFVDNDGQPFRPWMRLRINFSFYDCKLQEIFSRMNLLREDVFYLQFNNSHRVKPVQNRYYRRKSYLCYQLERANGQEPLKGYLLYKKGEQHVEILFLEKMRSMELSQVRITCYLTWSPCPNCARQLAAFKKDHPDLILRIYTSRLYFWRKKFQKGLCTLWRSGIHVDVMDLPQFADCWTNFVNPQRPFRPWNELEKNSWRIQRRLRRIKESWGL

SEQ ID NO: 39 - protein, 226 aa, Bos taurus
  REGION 1..226: note = MISC_FEATURE - Bovine APOBEC-3B polypeptide sequence
DGWEVAFRSGTVLKAGVLGVSMTEGWAGSGHPGQGACVWTPGTRNTMNLLREVLFKQQFGNQPRVPAPYYRRKTYLCYQLKQRNDLTLDRGCFRNKKQRHAERFIDKINSLDLNPSQSYKIICYITWSPCPNCANELVNFITRNNHLKLEIFASRLYFHWIKSFKMGLQDLQNAGISVAVMTHTEFEDCWEQFVDNQSRPFQPWDKLEQYSASIRRRLQRILTAPI

SEQ ID NO: 40 - protein, 490 aa, Pan troglodytes
  REGION 1..490: note = MISC_FEATURE - Chimpanzee APOBEC-3B polypeptide sequence
MNPQIRNPMEWMYQRTFYYNFENEPILYGRSYTWLCYEVKIRRGHSNLLWDTGVFRGQMYSQPEHHAEMCFLSWFCGNQLSAYKCFQITWFVSWTPCPDCVAKLAKFLAEHPNVTLTISAARLYYYWERDYRRALCRLSQAGARVKIMDDEEFAYCWENFVYNEGQPFMPWYKFDDNYAFLHRTLKEIIRHLMDPDTFTFNFNNDPLVLRRHQTYLCYEVERLDNGTWVLMDQHMGFLCNEAKNLLCGFYGRHAELRFLDLVPSLQLDPAQIYRVTWFISWSPCFSWGCAGQVRAFLQENTHVRLRIFAARIYDYDPLYKEALQMLRDAGAQVSIMTYDEFEYCWDTFVYRQGCPFQPWDGLEEHSQALSGRLRAILQVRASSLCMVPHRPPPPPQSPGPCLPLCSEPPLGSLLPTGRPAPSLPFLLTASFSFPPPASLPPLPSLSLSPGHLPVPSFHSLTSCSIQPPCSSRIRETEGWASVSKEGRDLG

SEQ ID NO: 41 - protein, 190 aa, Homo sapiens
  REGION 1..190: note = MISC_FEATURE - Human APOBEC-3C polypeptide sequence
  REGION 65..100: note = MISC_FEATURE - Nucleic acid editing domain
MNPQIRNPMKAMYPGTFYFQFKNLWEANDRNETWLCFTVEGIKRRSVVSWKTGVFRNQVDSETHCHAERCFLSWFCDDILSPNTKYQVTWYTSWSPCPDCAGEVAEFLARHSNVNLTIFTARLYYFQYPCYQEGLRSLSQEGVAVEIMDYEDFKYCWENFVYNDNEPFKPWKGLKTNFRLLKRRLRESLQ

SEQ ID NO: 42 - protein, 190 aa, Gorilla sp.
  REGION 1..190: note = MISC_FEATURE - Gorilla APOBEC-3C polypeptide sequence
  REGION 65..100: note = MISC_FEATURE - Nucleic acid editing domain
MNPQIRNPMKAMYPGTFYFQFKNLWEANDRNETWLCFTVEGIKRRSVVSWKTGVFRNQVDSETHCHAERCFLSWECDDILSPNTNYQVTWYTSWSPCPECAGEVAEFLARHSNVNLTIFTARLYYFQDTDYQEGLRSLSQEGVAVKIMDYKDFKYCWENFVYNDDEPFKPWKGLKYNFRFLKRRLQEILE

SEQ ID NO: 43 - protein, 202 aa, Macaca mulatta
  REGION 1..202: note = MISC_FEATURE - Rhesus macaque APOBEC-3A polypeptide sequence
  REGION 72..103: note = MISC_FEATURE - Nucleic acid editing domain
MDGSPASRPRHLMDPNTFTFNFNNDLSVRGRHQTYLCYEVERLDNGTWVPMDERRGFLCNKAKNVPCGDYGCHVELRFLCEVPSWQLDPAQTYRVTWFISWSPCFRRGCAGQVRVFLQENKHVRLRIFAARIYDYDPLYQEALRTLRDAGAQVSIMTYEEFKHCWDTFVDRQGRPFQPWDGLDEHSQALSGRLRAILQNQGN

SEQ ID NO: 44 - protein, 185 aa, Bos taurus
  REGION 1..185: note = MISC_FEATURE - Bovine APOBEC-3A polypeptide sequence
  REGION 56..86: note = MISC_FEATURE - Nucleic acid editing domain
MDEYTFTENFNNQGWPSKTYLCYEMERLDGDATIPLDEYKGFVRNKGLDQPEKPCHAELYFLGKIHSWNLDRNQHYRLTCFISWSPCYDCAQKLTTFLKENHHISLHILASRIYTHNRFGCHQSGLCELQAAGARITIMTFEDFKHCWETFVDHKGKPFQPWEGLNVKSQALCTELQAILKTQQN

SEQ ID NO: 45 - protein, 200 aa, Homo sapiens
  REGION 1..200: note = MISC_FEATURE - Human APOBEC-3H polypeptide sequence
  REGION 54..88: note = MISC_FEATURE - Nucleic acid editing domain
MALLTAETFRLQFNNKRRLRRPYYPRKALLCYQLTPQNGSTPTRGYFENKKKCHAEICFINEIKSMGLDETQCYQVTCYLTWSPCSSCAWELVDFIKAHDHLNLGIFASRLYYHWCKPQQKGLRLLCGSQVPVEVMGFPKFADCWENFVDHEKPLSFNPYKMLEELDKNSRAIKRRLERIKIPGVRAQGRYMDILCDAEV

SEQ ID NO: 46 - protein, 210 aa, Macaca mulatta
  REGION 1..210: note = MISC_FEATURE - Rhesus macaque APOBEC-3H polypeptide sequence
MALLTAKTFSLQFNNKRRVNKPYYPRKALLCYQLTPQNGSTPTRGHLKNKKKDHAEIRFINKIKSMGLDETQCYQVTCYLTWSPCPSCAGELVDFIKAHRHLNLRIFASRLYYHWRPNYQEGLLLLCGSQVPVEVMGLPEFTDCWENFVDHKEPPSFNPSEKLEELDKNSQAIKRRLERIKSRSVDVLENGLRSLQLGPVTPSSSIRNSR

SEQ ID NO: 47 - protein, 386 aa, Homo sapiens
  REGION 1..386: note = MISC_FEATURE - Human APOBEC-3D polypeptide sequence
  REGION 78..109: note = MISC_FEATURE - Nucleic acid editing domain
  REGION 262..296: note = MISC_FEATURE - Nucleic acid editing domain
MNPQIRNPMERMYRDTFYDNFENEPILYGRSYTWLCYEVKIKRGRSNLLWDTGVFRGPVLPKRQSNHRQEVYFRFENHAEMCFLSWFCGNRLPANRRFQITWFVSWNPCLPCVVKVTKFLAEHPNVTLTISAARLYYYRDRDWRWVLLRLHKAGARVKIMDYEDFAYCWENFVCNEGQPFMPWYKFDDNYASLHRTLKEILRNPMEAMYPHIFYFHFKNLLKACGRNESWLCFTMEVTKHHSAVFRKRGVFRNQVDPETHCHAERCFLSWFCDDILSPNTNYEVTWYTSWSPCPECAGEVAEFLARHSNVNLTIFTARLCYFWDTDYQEGLCSLSQEGASVKIMGYKDFVSCWKNFVYSDDEPFKPWKGLQTNFRLLKRRLREILQ

SEQ ID NO: 48 - protein, 236 aa, Homo sapiens
  REGION 1..236: note = MISC_FEATURE - Human APOBEC-1 polypeptide sequence
MTSEKGPSTGDPTLRRRIEPWEFDVFYDPRELRKEACLLYEIKWGMSRKIWRSSGKNTTNHVEVNFIKKFTSERDFHPSMSCSITWFLSWSPCWECSQAIREFLSRHPGVTLVIYVARLFWHMDQQNRQGLRDLVNSGVTIQIMRASEYYHCWRNFVNYPPGDEAHWPQYPPLWMMLYALELHCIILSLPPCLKISRRWQNHLTFFRLHLQNCHYQTIPPHILLATGLIHPSVAWR

SEQ ID NO: 49 - protein, 229 aa, Mus musculus
  REGION 1..229: note = MISC_FEATURE - Mouse APOBEC-1 polypeptide sequence
MSSETGPVAVDPTLRRRIEPHEFEVFFDPRELRKETCLLYEINWGGRHSVWRHTSQNTSNHVEVNFLEKFTTERYFRPNTRCSITWFLSWSPCGECSRAITEFLSRHPYVTLFIYIARLYHHTDQRNRQGLRDLISSGVTIQIMTEQEYCYCWRNFVNYPPSNEAYWPRYPHLWVKLYVLELYCIILGLPPCLKILRRKQPQLTFFTITLQTCHYQRIPPHLLWATGLK

SEQ ID NO: 50 - protein, 224 aa, Homo sapiens
  REGION 1..224: note = MISC_FEATURE - Human APOBEC-2 polypeptide sequence
MAQKEEAAVATEAASQNGEDLENLDDPEKLKELIELPPFEIVTGERLPANFFKFQFRNVEYSSGRNKTFLCYVVEAQGKGGQVQASRGYLEDEHAAAHAEEAFFNTILPAFDPALRYNVTWYVSSSPCAACADRIIKTLSKTKNLRLLILVGRLFMWEEPEIQAALKKLKEAGCKLRIMKPQDFEYVWQNFVEQEEGESKAFQPWEDIQENFLYYEEKLADILK

SEQ ID NO: 51 - protein, 224 aa, Mus musculus
  REGION 1..224: note = MISC_FEATURE - Mouse APOBEC-2 polypeptide sequence
MAQKEEAAEAAAPASQNGDDLENLEDPEKLKELIDLPPFEIVTGVRLPVNFFKFQFRNVEYSSGRNKTFLCYVVEVQSKGGQAQATQGYLEDEHAGAHAEEAFFNTILPAFDPALKYNVTWYVSSSPCAACADRILKTLSKTKNLRLLILVSRLFMWEEPEVQAALKKLKEAGCKLRIMKPQDFEYIWQNFVEQEEGESKAFEPWEDIQENFLYYEEKLADILK

SEQ ID NO: 52 - protein, 224 aa, Rattus sp.
  REGION 1..224: note = MISC_FEATURE - Rat APOBEC-2 polypeptide sequence
MAQKEEAAEAAAPASQNGDDLENLEDPEKLKELIDLPPFEIVTGVRLPVNFFKFQFRNVEYSSGRNKTFLCYVVEAQSKGGQVQATQGYLEDEHAGAHAEEAFFNTILPAFDPALKYNVTWYVSSSPCAACADRILKTLSKTKNLRLLILVSRLFMWEEPEVQAALKKLKEAGCKLRIMKPQDFEYLWQNFVEQEEGESKAFEPWEDIQENFLYYEEKLADILK

SEQ ID NO: 53 - protein, 208 aa, Petromyzon marinus
  REGION 1..208: note = MISC_FEATURE - Petromyzon marinus CDA1 (pmCDAl) polypeptide sequence
MTDAEYVRIHEKLDIYTFKKQFFNNKKSVSHRCYVLFELKRRGERRACFWGYAVNKPQSGTERGIHAEIFSIRKVEEYLRDNPGQFTINWYSSWSPCADCAEKILEWYNQELRGNGHTLKIWACKLYYEKNARNQIGLWNLRDNGVGLNVMVSEHYQCCRKIFIQSSHNQLNENRWLEKTLKRAEKRRSELSFMIQVKILHTTKSPAV

SEQ ID NO: 54 - protein, 381 aa, Homo sapiens
  REGION 1..381: note = MISC_FEATURE - Human APOBEC3G D316R D317R polypeptide sequence
MKPHFRNTVERMYRDTFSYNFYNRPILSRRNTVWLCYEVKTKGPSRPPLDAKIFRGQVYSELKYHPEMRFFHWFSKWRKLHRDQEYEVTWYISWSPCTKCTRDMATFLAEDPKVTLTIFVARLYYFWDPDYQEALRSLCQKRDGPRATMKFNYDEFQHCWSKFVYSQRELFEPWNNLPKYYILLHFMLGEILRHSMDPPTFTFNFNNEPWVRGRHETYLCYEVERMHNDTWVLLNQRRGFLCNQAPHKHGFLEGRHAELCFLDVIPFWKLDLDQDYRVTCFTSWSPCFSCAQEMAKFISKKHVSLCIFTARIYRRQGRCQEGLRTLAEAGAKISFTYSEFKHCWDTFVDHQGCPFQPWDGLDEHSQDLSGRLRAILQNQEN

SEQ ID NO: 55 - protein, 182 aa, Homo sapiens
  REGION 1..182: note = MISC_FEATURE - Human APOBEC3G chain A polypeptide sequence
MDPPTFTFNFNNEPWWGRHETYLCYEVERMHNDTWVLLNQRRGFLCNQAPHKHGFLEGRHAELCFLDVIPFWKLDLDQDYRVTCFTSWSPCFSCAQEMAKFISKNKHVSLCIFTARIYDDQGRCQEGLRTLAEAGAKISFTYSEFKHCWDTFVDHQGCPFQPWDGLDEHSQDLSGRLRAILQ

SEQ ID NO: 56 - protein, 184 aa, Homo sapiens
  REGION 1..184: note = MISC_FEATURE - Human APOBEC3G chain A D120R D121R polypeptide sequence
MDPPTFTFNFNNEPWVRGRHETYLCYEVERMHNDTWVLLNQRRGFLCNQAPHKHGFLEGRHAELCFLDVIPFWKLDLDQDYRVTCFTSWSPCFSCAQEMAKFISKNKHVSLCIFTARIYRRQGRCQEGLRTLAEAGAKISFMTYSEFKHCWDTFVDHQGCPFQPWDGLDEHSQDLSGRLRAILQ

SEQ ID NO: 57 - protein, 367 aa, Homo sapiens
  REGION 1..367: note = MISC_FEATURE - hAPOBEC-4 polypeptide sequence
MEPIYEEYLANHGTIVKPYYWLSFSLDCSNCPYHIRTGEEARVSLTEFCQIFGFPYGTTFPQTKHLTFYELKTSSGSLVQKGHASSCTGNYIHPESMLFEMNGYLDSAIYNNDSIRHIILYSNNSPCNEANHCCISKMYNFLITYPGITLSIYFSQLYHTEMDFPASAWNREALRSLASLWPRVVLSPISGGIWHSVLHSFISGVSGSHVFQPILTGRALADRHNAYEINAITGVKPYFTDVLLQTKRNPNTKAQEALESYPLNNAFPGQFFQMPSGQLQPNLPPDLRAPVVFVLVPLRDLPPMHMGQNPNKPRNIVRHLNMPQMSFQETKDLGRLPTGRSVEIVEITEQFASSKEADEKKKKKGKK

SEQ ID NO: 58 - protein, 388 aa, Rattus norvegicus
  REGION 1..388: note = MISC_FEATURE - rAPOBEC-4 polypeptide sequence
MEPLYEEYLTHSGTIVKPYYWLSVSLNCTNCPYHIRTGEEARVPYTEFHQTFGFPWSTYPQTKHLTFYELRSSSGNLIQKGLASNCTGSHTHPESMLFERDGYLDSLIFHDSNIRHIILYSNNSPCDEANHCCISKMYNFLMNYPEVTLSVFFSQLYHTENQFPTSAWNREALRGLASLWPQVTLSAISGGIWQSILETFVSGISEGLTAVRPFTAGRTLTDRYNAYEINCITEVKPYFTDALHSWQKENQDQKVWAASENQPLHNTTPAQWQPDMSQDCRTPAVFMLVPYRDLPPIHVNPSPQKPRTVVRHLNTLQLSASKVKALRKSPSGRPVKKEEARKGSTRSQEANETNKSKWKKQTLFIKSNICHLLEREQKKIGILSSWSV

SEQ ID NO: 59 - protein, 363 aa, Macaca fascicularis
  REGION 1..363: note = MISC_FEATURE - mfAPOBEC-4 polypeptide sequence
MEPTYEEYLANHGTIVKPYYWLSFSLDCSNCPYHIRTGEEARVSLTEFCQIFGFPYGTTYPQTKHLTFYELKTSSGSLVQKGHASSCTGNYIHPESMLFEMNGYLDSAIYNNDSIRHIILYCNNSPCNEANHCCISKVYNFLITYPGITLSIYFSQLYHTEMDFPASAWNREALRSLASLWPRVVLSPISGGIWHSVLHSFVSGVSGSHVFQPILTGRALTDRYNAYEINAITGVKPFFTDVLLHTKRNPNTKAQMALESYPLNNAFPGQSFQMTSGIPPDLRAPVVFVLLPLRDLPPMHMGQDPNKPRNIIRHLNMPQMSFQETKDLERLPTRRSVETVEITERFASSKQAEEKTKKKKGKK

SEQ ID NO: 60 - protein, 218 aa, Rattus norvegicus
  REGION 1..218: note = MISC_FEATURE - rAPOBEC-1 (delta 177-186) polypeptide sequence
MSSETGPVAVDPTLRRRIEPHEFEVFFDPRELRKETCLLYEINWGGRHSIWRHTSQNTNKHVEVNFIEKFTTERYFCPNTRCSITWFLSWSPCGECSRAITEFLSRYPHVTLFIYIARLYHHADPRNRQGLRDLISSGVTIQIMTEQESGYCWRNFVNYSPSNEAHWPRYPHLWVRGLPPCLNILRRKQPQLTFFTIALQSCHYQRLPPHILWATGLK

SEQ ID NO: 61 - protein, 218 aa, Rattus norvegicus
  REGION 1..218: note = MISC_FEATURE - rAPOBEC-1 (delta 202-213) polypeptide sequence
MSSETGPVAVDPTLRRRIEPHEFEVFFDPRELRKETCLLYEINWGGRHSIWRHTSQNTNKHVEVNFIEKFTTERYFCPNTRCSITWFLSWSPCGECSRAITEFLSRYPHVTLFIYIARLYHHADPRNRQGLRDLISSGVTIQIMTEQESGYCWRNFVNYSPSNEAHWPRYPHLWVRLYVLELYCIILGLPPCLNILRRKQPQHYQRLPPHILWATGLK

SEQ ID NO: 62 - protein, 198 aa, Mus musculus
  REGION 1..198: note = MISC_FEATURE - mouse cytidine deaminase polypeptide sequence
  REGION 1..30: note = MISC_FEATURE - Nuclear localization sequence
  REGION 183..198: note = MISC_FEATURE - Nuclear export signal
MDSLLMKQKKFLYHFKNVRWAKGRHETYLCYVVKRRDSATSCSLDFGHLRNKSGCHVELLFLRYISDWDLDPGRCYRVTWFTSWSPCYDCARHVAEFLRWNPNLSLRIFTARLYFCEDRKAEPEGLRRLHRAGVQIGIMTFKDYFYCWNTFVENRERTFKAWEGLHENSVRLTRQLRRILLPLYEVDDLRDAFRMLGF

SEQ ID NO: 63 - protein, 224 aa, Petromyzon marinus
  REGION 1..224: note = MISC_FEATURE - pmCDA-1 polypeptide sequence
MAGYECVRVSEKLDFDTFEFQFENLHYATERHRTYVIFDVKPQSAGGRSRRLWGYIINNPNVCHAELILMSMIDRHLESNPGVYAMTWYMSWSPCANCSSKLNPWLKNLLEEQGHTLTMHFSRIYDRDREGDHRGLRGLKHVSNSFRMGVVGRAEVKECLAEYVEASRRTLTWLDTTESMAAKMRRKLFCILVRCAGMRESGIPLHLFTLQTPLLSGRVVWWRV

SEQ ID NO: 64 - protein, 331 aa, Petromyzon marinus
  REGION 1..331: note = MISC_FEATURE - pmCDA-2 polypeptide sequence
MELREVVDCALASCVRHEPLSRVAFLRCFAAPSQKPRGTVILFYVEGAGRGVTGGHAVNYNKQGTSIHAEVLLLSAVRAALLRRRRCEDGEEATRGCTLHCYSTYSPCRDCVEYIQEFGASTGVRVVIHCCRLYELDVNRRRSEAEGVLRSLSRLGRDFRLMGPRDAIALLLGGRLANTADGESGASGNAWVTETNVVEPLVDMTGFGDEDLHAQVQRNKQIREAYANYASAVSLMLGELHVDPDKFPFLAEFLAQTSVEPSGTPRETRGRPRGASSRGPEIGRQRPADFERALGAYGLFLHPRIVSREADREEIKRDLIVVMRKHNYQGP

SEQ ID NO: 65 - protein, 209 aa, Petromyzon marinus
  REGION 1..209: note = MISC_FEATURE - pmCDA-5 polypeptide sequence
MAGDENVRVSEKLDFDTFEFQFENLHYATERHRTYVIFDVKPQSAGGRSRRLWGYIINNPNVCHAELILMSMIDRHLESNPGVYAMTWYMSWSPCANCSSKLNPWLKNLLEEQGHTLMMHFSRIYDRDREGDHRGLRGLKHVSNSFRMGVVGRAEVKECLAEYVEASRRTLTWLDTTESMAAKMRRKLFCILVRCAGMRESGMPLHLFT

SEQ ID NO: 66 - protein, 158 aa, Saccharomyces cerevisiae
  REGION 1..158: note = MISC_FEATURE - yCD polypeptide sequence
MVTGGMASKWDQKGMDIAYEEAALGYKEGGVPIGGCLINNKDGSVLGRGHNMRFQKGSATLHGEISTLENCGRLEGKVYKDTTLYTTLSPCDMCTGAIIMYGIPRCVVGENVNFKSKGEKYLQTRGHEVVVVDDERCKKIMKQFIDERPQDWFEDIGE

SEQ ID NO: 67 - protein, 194 aa, synthetic construct
  REGION 1..194: note = cytidine deaminase polypeptide sequence
MKPQIRDHRPNPMEAMYPHIFYFHFENLEKAYGRNETWLCFTVEIIKQYLPVPWKKGVFRNQVDPETHCHAEKCFLSWFCNNTLSPKKNYQVTWYTSWSPCPECAGEVAEFLAEHSNVKLTIYTARLYYFWDTDYQEGLRSLSEEGASVEIMDYEDFQYCWENFVYDDGEPFKRWKGLKYNFQSLTRRLREILQ

SEQ ID NO: 68 - protein, 192 aa, synthetic construct
  REGION 1..192: note = cytidine deaminase polypeptide sequence
MADSSEKMRGQYISRDTFEKNYKPIDGTKEAHLLCEIKWGKYGKPWLHWCQNQRMNIHAEDYFMNNIFKAKKHPVHCYVTWYLSWSPCADCASKIVKFLEERPYLKLTIYVAQLYYHTEEENRKGLRLLRSKKVIIRVMDISDYNYCWKVFVSNQNGNEDYWPLQFDPWVKENYSRLLDIFWESKCRSPNPW

SEQ ID NO: 69 - protein, 280 aa, synthetic construct
  REGION 1..280: note = cytidine deaminase polypeptide sequence
MDPQRLRQWPGPGPASRGGYGQRPRIRNPEEWFHELSPRTFSFHFRNLRFASGRNRSYICCQVEGKNCFFQGIFQNQVPPDPPCHAELCFLSWFQSWGLSPDEHYYVTWFISWSPCCECAAKVAQFLEENRNVSLSLSAARLYYFWKSESREGLRRLSDLGAQVGIMSFQDFQHCWNNFVHNLGMPFQPWKKLHKNYQRLVTELKQILREEPATYGSPQAQGKVRIGSTAAGLRHSHSHTRSEAHLRPNHSSRQHRILNPPREARARTCVLVDASWICYR

SEQ ID NO: 70 - protein, 555 aa, synthetic construct
  REGION 1..555: note = pYY-BEM3.1; tr|F7B644|F7B644_HORSE polypeptide sequence
MPRGRARERQRRNPMEKLDAEAFSFHFLNMEFVYDRNCSYLCYQVEGRLSGSPVLSEQGVFPNEVCGKTRRHAELCFLDWFRGRLSPDEYYCVTWFISWSPCSNCAREVAEFLKRHRNVELSIFAARLYYCRDHEQGLQSLCNRGAQLAVMLRKDFTYCWDNFVHNSGREFSPWENIDANSDLLARKLEDLLKNPMEKLHRKTFSFHFRNLKFAKGRKCSYLCYRVEGRLSGSPGLSEQGVFLNEVCDENCRHAELCFLHWFRGRLSPHADYRVTWFISWSPCSNCAREVAEFLKQHRNVELHISAARLYYWQRNKPGLRNLRSSGAQLAIMFFWDFRDCWDNFVHNSGRHFIPWKKINVNSRLLATKLEDLLKNPLEKLHPNTFSFHFCNLEFAYDRKYSYLCYQVEGRLSGSPGLSEQGVFLNEVCGKTRCHAELCFLDWFRVRLSPDEYYRVTWFISWSPCFYCAREVADFLKQYRNVKLSIFAARLYYCRDHAQGLRSLCSSGAQLAIMFFWDFRYCWDNFVHNSGREFRPWKKINVNSRLLATKLEDILK

SEQ ID NO: 71 - protein, 437 aa, synthetic construct
  REGION 1..437: note = pYY-BEM3.2; tr|D1LZA1|D1LZA1_PANTI polypeptide sequence
MEPWRPSPRNPMDRIDPKTFRFQFPNLRYASGRKLCYLCFQVERDYFYYNDSDWGVFRNEVHPWAPCHAEQCFLSWFRDQYPYRDEDYNVTWFLSWSPCPTCAEEVVEFLEEYRNLTLSIFTSRLYYFWHPNYQEGLCKLWDAGVQLDIMSCDEFEYCWDNFVYHKGMRFQRRNLLKDYDFLAAKLQEILSPGQQRKRDWPFPPRPGAQVDPRSWVQEVTEPGINTRRHPLHLLVSFLLPRPTMNPLQEDIFYRQFGNQHRVPKPYYYRRKTYLCYQLKLPEGTLIDKDCLRNKKKRHAEICFIDKIKSLTRDTSQRFEIICYITWSPCPFCAEELVAFVKDNPHLSLRIFASRLYVHWRWKYQQGLRHLHASGIPVAVMSLPEFEDCWRNFVDHQDRLFQPWRNLDQYSESIKRRLGKILTPLNDLRNDFRNLKLE

SEQ ID NO: 72 - protein, 440 aa, synthetic construct
  REGION 1..440: note = pYY-BEM3.3; tr|A0A3Q0DM17|A0A3Q0DM17_TARSY polypeptide sequence
MPMKRMYSNIYFDHFNNQRLLSGQNAPWLCFKVERVENCMLVPLETGVFGNQVSGCCGKTERPVEPTSLTRSVLVSPNPGTELRAQQPSRKGHLGKLGCVEYPSPGLALVMLGYGASTYCPDSSMYCPETCHHPEMCFLYWFEKTLSHEEQYQITWYVSWSPCVNCAEEVAEFLSVHPKVNLTIYAARLYCYQKLNHRQGLRRLCKEGACVKIMNYEEFDHCWENFVYNNYKSFKPWVKLQDNYELLATELDKILRIPMERMPQKKFRFHFQNLIAKDRNTTWLCFEVKNVRKKHPPDLLERGIFQNQVTPRINCHAEMCFLSWFLENMLLHGKRYQVTWYISWSPCSICAEEVAEFLSAHPKVSLTIYAARLYYFWVPGYRQGLRRLVEEGARVEIMNYEEFDYCWENFVSINNEPFQPWEGLHEKYGYLVTKLNNILG

SEQ ID NO: 73 - protein, 453 aa, synthetic construct
  REGION 1..453: note = pYY-BEM3.4; tr|A0A3Q0DNJ5|A0A3Q0DNJ5_TARSY polypeptide sequence
MEDNPEPRPRQQMDQDTFIFNFNNDPSVRGRHQTFLCYEVEHLDDDTWVPQDKYLGFLHNQPQSRSNAYCAYHAELCFLELVSSWQLDPAQRYRVTCFISWSPCSSCAQEVAAFLKKNRHVTLRILAARIYDYYQGYEDGLRTLQGVGVDITVMTSAEFGHCWNTFVDHQGSPFQPWEGLDQHSQVIWQRMQDILQVIPAKYLMEKVKYTVTVDILFKGRVPGPRYLMDQNTFTRNFINNLSVSGRRQTLLCYEVERLGGDIWVPLDQLRGFLLSQARDVLNYYQGRHAEPCFLDLVSSWQLDPAQHYRVTWFISWSPCTSCAQAVAAFLRENRHVTLRILAARIYDYHQGYEEGLRTLQRTGAHIDIMTFKEFGHCWNTFVNHKGSPFKSWTGLDQHSQALRKRLQDILHTMASSLWDQSEPKKPIPSQEVTLPESIPPSHGNRFRLVKRPS

SEQ ID NO: 74 - protein, 424 aa, synthetic construct
  REGION 1..424: note = pYY-BEM3.5; tr|G5AYU5|G5AYU5_HETGA polypeptide sequence
FCFLSCVHRKPIERIYKKAFRFYFRNLRCAYGRNKTFLCYEVKRERDNKVLHKGVVLNQVEPYMPLHAELRFLSWFHDTLLCPLGSYQVTLYVSWSPCSECAEELTTFLAGHRNVTMTIYVAQLYYCNWKSPNREGLKILIAEDARLRVMFYDEFLYCWRNFVKNDYNNFDPWSLLDENSRYHNRILQNILKGWGRPHRVGPEGEQTATPGGSGGHCISVFSLLRRREMTLKEETFRVQFNNAYKAPKPYRRRVTYLCYQLQEANGDPLTKGCLRTKKGYHAESRFIKRICSMDLGQDQSYQVTCFLTWSPCPHCAQELVSFKRAHPHLRLQIFTARLFFHWKRSYQEGLQRLCRAQVPVAVMGHPEFAYCWDNFVDHQPGPFEPPWAKLEYYSSCLKRRLQQILRSWGVDDLTNDFRNLQLGP

SEQ ID NO: 75 - protein, 385 aa, synthetic construct
  REGION 1..385: note = pYY-BEM3.6; tr|A0A2Y9QMV5|A0A2Y9QMV5_TRIMA polypeptide sequence
MLSSPQTPGTRKPMKTLAPDEFSFNFENLRLAHGRNTTFLCFQVETKAPPSLNSPDSGIFQNQDHCPSHHHAEMVFLTWFQKRLSPAQHYEVTWYMSWSPCSRCAVQVAKFLKSNSTVNLSIFVARLYYPRELETKDGLHSLWQAGAQVQIMFFQDFKYCWENFVNNEGKPFQPWKNLDENSKDWDTELKDIHRNTTDLLTEEMFYSQFYNREKKSSIPRKTYLCYQLNEPQPVKRCLHYKKGYHAVTRFIDGIVSMNLDPARSYDITCYFTWSPCNRYARKLVSFIEDYPNLRLKVYTSRLYFHWCWTNMQGLQHLQNSRVTVAVMTFRDFEYCWKNFVDNQGKPFEPWEKLDLYSQSTERRLRRILKPLTPDVLNEDFGNLHL

SEQ ID NO: 76 - protein, 381 aa, synthetic construct
  REGION 1..381: note = pYY-BEM3.7; tr|H0XHI0|H0XHI0_OTOGA polypeptide sequence
LSCAFRDPMNRMYPKTFCQNFEKEPCPSNQNSSWLCFEVETKNSAVFFHRGVFRNQPAPPPRAPTSVLLSQGPVKTPCHAEECFLTWIQGVLPPDHHYHVTWYVSRGPCANCANLIVHFLAMHRRVTLTIFAAHLNFFWESDFQQGLLRMDQEGVQLHIMGYEEFEYCWDNFVYNQRKQFVPWNGLNENYEFMVSTLEDILRSPLDRIRQKDFSIHFRNSLWLDDKSTWLCFEVKRTKSPVPLYRGVFRNQSPPKTPCHAEVRFFTWLQDLPPDFCCQFTWYLSWSPCADCADLVANFLAKHRNVSLTIFVARLYYYRDPEMHRGLRRMYQEGANVDIMSVIEFEYCWDNFVYNQGKQFVPWNGLNENYEFLVPRLQEILE

SEQ ID NO: 77 - protein, 337 aa, synthetic construct
  REGION 1..337: note = pYY-BEM3.8; tr|A0A3M0K4Y7|A0A3M0K4Y7_HIRRU polypeptide sequence
MYISKKALRRHFDPRVYPRETYLLCELQWEGSRRVWIHWIRNVPDHHAEEYFLEEVFEPRNYGFCNITLYLSWSPCCTCCSKIRDFLKRNPNVKIDIRVARLIYPDYAETRSSLRELNGLQRVSIQVMEAAGLSCIESKNHRISQVERDPKGSSSPTLFTLQDHLKLSNMTESVIQDSVSIQICYQMRILGFQCHIRWKLQPEDFQRNYSPNQIGRVVYLLYEVRWRRGSIWRNWCSNNPEQHAEVNFLENHFHHRPQTPCSITWFLSTSPCGKCSRRILEFLKSQPNVTLEIYAAKLFRHHDIRNRQGLRNLMMNGVTIYIMNLEGNPASLCLSVD

SEQ ID NO: 78 - protein, 237 aa, synthetic construct
  REGION 1..237: note = pYY-BEM3.9; tr|A0A3P4LUZ8|A0A3P4LUZ8_GULGU polypeptide sequence
MSFEDYEYCWETFVDHKGMYFQSWDLLRDNDLLAAELKNILRSTMNPLRQEIFYHQFGNQPRAPRPYHRRKTYLCYQLQPHEGPITARVCLQNKKKRHAEIRFIDNIRALRLDRSQTFEITCYLTWSPCPTCAKALAVFVQDHPHISLRLFASRLFIHWCWKYQEGLRLLHRSRIPVAVMRLQEFEDCWRNFVDNQDEPFQPWNKLEQYSESITRRLRRILGHPQNNLENDFRNLHI

SEQ ID NO: 79 - protein, 221 aa, synthetic construct
  REGION 1..221: note = pYY-BEM3.10; tr|G5BPM8|G5BPM8_HETGA polypeptide sequence
RRRIEPWQFEASFDPRQLRRETCLLSEVRWGTSPRAWRGCSLNTARHAEVSFMDRLTSEGRLRGPVRCSITWFLSWSPCGACAQAIGEFLRQHPNVSLVIYIARLFWHVDEQNRQGLRDLVTRGVRMQVMSDPEFAHCWRNFVNYSPGQEARWPQVPPVWTWLYSLELHCILLNLPPCLKISRRHHNQLTFFQLILQNCHYQAIPSPVLLASGLIHPFVTW

SEQ ID NO: 80 - protein, 211 aa, synthetic construct
  REGION 1..211: note = pYY-BEM3.11; tr|H2M862|H2M862_ORYLA polypeptide sequence
MITKLDSVLLPKKKFIYHYKNMRWARGRHETYLCFVVKRRVGPESLSFDFGHLRNRNGCHVELLFLRHLSALCPGLWGYGATGQGRVSYSITWFCSWSPCANCSFRLAQFLSQTPNLRLRIFVSRLYFCDLEDSREREGLRMLKKVGVHITVMSYKDYFYCWQTFVARKQSKFKPWDGLHQNSVRLSRKLNRILQPCETEDFRDAFKLLGL

SEQ ID NO: 81 - protein, 353 aa, synthetic construct
  REGION 1..353: note = pYY-BEM3.12; tr|H0Y0C6|H0Y0C6_OTOGA polypeptide sequence
MYLKTFYRHFNNRPYLSRRNDTWLCFEVKTTSSNSPGSFYSGVFRNQGPRYCPWHTELCFLTWVRPIVSHHHFYQITWYMSWSPCANCAWQVATFLATHENVSLTNYTVRIYYFWRQDYRQGLLRMIEEGTQVYVMSSKEFQHCWENFVDHWGTRWVTCWNRLKKNYEFLVTRLSEILSDPKERISPNTFYNQFNNTPVPRGRKDTWLCFEVKEKNSNSPGSFHRGVFQNQVFSGTSSHARRCPPDHHYEVTWYTSWSPCAHCAWHVVNFLTSNPNVSLTIFAARLYYIYRPEIQQGLRRVFQEGAKVHIMSLKEFKYCWAKLVYNSGMRFMPWYQFNFNFLFPNTTLKGDLH

SEQ ID NO: 82 - protein, 189 aa, synthetic construct
  REGION 1..189: note = pYY-BEM3.13; tr|A0A3Q2Z5X6|A0A3Q2Z5X6_HIPCM polypeptide sequence
MDVHFMNFIYHYKNMRWAKGRNETYLCFVVKRRVGPNSLTFDFGHLRNRNGCHVELLFLRYLGRRLSYSITWFCSWSPCANCSAALSQFLSRMPNLRLRIFVARLYFCDMEDSHEREGLRLLQKAGVQVTVMSYKDYYYCWQTFVDRKKSHFKAWEDLHQNSVRLSRKLNRILQPCEMDLRDAFKLLGL

SEQ ID NO: 83 - protein, 190 aa, synthetic construct
  REGION 1..190: note = pYY-BEM3.15; tr|A0A2K6NY90|A0A2K6NY90_RHIRO polypeptide sequence
MNPHIRNPMEAMYPGTFYFHFKNLWEADNRNESWLCFAVEVIKHHSTVSWKRGVFRNQVDPETHCHAEKCFLSWFCDNTLSPKKNYQVTWYTSWSPCPECAREVAKFLARHSNVMLTIYTARLYYSQYPNYQEGLRRLNEEGVPVEIMDYEDFKYCWENFVYNGDELFKPWKGLKYNFLFLDSKLQEILE

SEQ ID NO: 84 - protein, 202 aa, synthetic construct
  REGION 1..202: note = pYY-BEM3.16; tr|Q6ICH2|Q6ICH2_HUMAN polypeptide sequence
MNPQIRNPMERMYRDTFYDNFENEPILYGRSYTWLCYEVKIKRGRSNLLWDTGVFRGPVLPKRQSNHRQEVDPETHCHAERCFLSWFCDDILSPNTNYEVTWYTSWSPCPECAGEVAEFLARHSNVNLTIFTARLCYFWDTDYQEGLCSLSQEGASVKIMGYKDFVSCWKNFVYSDDEPFKPWKGLQTNFRLLKRRLREILQ

SEQ ID NO: 85 - protein, 202 aa, synthetic construct
  REGION 1..202: note = pYY-BEM3.17; tr|G8GPV1|G8GPV1_CERNE polypeptide sequence
MDGSPASRPGHVMDPGTFTSNFNNKPWVSGQRETYLCYKVERSHNDTWVLLNQHRGFLRNQAKNRLHGDYGCHAELCFLGEVPSWRLDPTQTYRVTWFISWSPCFSGGCAEQVRAFLQENTHVRLRIFAARIYDYDFLYQEALRTLRDAGAQVSIMTYEEFKHCWDTFVDHQGRPFQPWDGLDEHSQALSGRLQAILQNQGN

SEQ ID NO: 86 - protein, 181 aa, synthetic construct
  REGION 1..181: note = pYY-BEM3.18; tr|Q1WBT6|Q1WBT6_SYMSY polypeptide sequence
MALLTAKTFRLQFNNKRRVTKPYYPRKALLCYQLTPQNGSTPTRGYFKNKKKRHAEIRFINKIKSMGLDETQCYQVTCYLTWSPCPSCAWELVDFIKAHDHLNLGIFASRLYYHWCRHQQEGLRLLCGSQVPVEVMGFPEFADCWENFVDHEEPLSFNPSEMLEELDKNSRAIKRRLEKIK

SEQ ID NO: 87 - protein, 211 aa, synthetic construct
  REGION 1..211: note = pYY-BEM3.19; tr|A0A3B4CS14|A0A3B4CS14_PYGNA polypeptide sequence
MDNTNRRKFIYHYKNVRWARGRHETYLCFVVKKRNSPDSLSFDFGHLRNRNGCHVELLFLRYIEVLCPGLWGSGVDGVRVSYAVTWFCSWSPCSNCAQRLTNFLSQTPNLRLRIFVARLYFCDEEDSLEREGLRHLQRAGVQITVMTYKDFFYCWQTFVASRERCFKAWEGLRQNSVRLSRKLNRILQVFISTPVISPLITTHLGQSWAGG

SEQ ID NO: 88 - protein, 315 aa, synthetic construct
  REGION 1..315: note = pYY-BEM3.20; tr|A0A087XZI4|A0A087XZI4_POEFO polypeptide sequence
RKVSYSVTWFCSWSPCANCSIRLAQFLHQTPNLRLRIFVSRLYFCDLEDSREREGLRILKKAGVHITVMSYKDYFYCWQTFVAKSQSKFKPWDGLHQNYIRLSRKLNRILQPALDIKKFIYHYKNLRWARGRCETYLCFVVKKKLHLFMFVIVGRNRLFDLNVTMNNKSLYLIPLHLQLLFLRHLGALCPGLWGYGVTGERKVSYSVTWFCSWSPCANCSIRLAQFLHQTPNLRLRIFVSRLYFCDLEDSREREGLRILKKAGVHITVMSYKDYFYCWQTFVAKSQSKFKPWDGLHQNYIRLSRKLNRILQVQFF

SEQ ID NO: 89 - protein, 189 aa, synthetic construct
  REGION 1..189: note = pYY-BEM3.21; tr|A0A341AEK4|A0A341AEK4_9CETA polypeptide sequence
MASDRGPSAGDATSRRRIEPWEFEVSFDPRELCKETRLLYEIKWGRSQHVWRHSGKNTTNHVECNFIEKFTSERPFHRSVSCCITWFLSWSPCWECSKAIREFLNQHPRVTLFIYVARLFQHMDPQNRQGLRDLIHSGVTIQIMGPTEYDYCWRNFVNYPPGKEAHWPRYPPPLMKLYALELHCIILVP

SEQ ID NO: 90 - protein, 180 aa, synthetic construct
  REGION 1..180: note = pYY-BEM3.22; tr|E2D879|E2D879_MUSMI polypeptide sequence
RNLISRETFNFNFENLCYAKGRKNTFLCYEVTRKDCDSPVSLCHGVFKNKGSIHAEICFLYWFHDKVLKVLTPREEFKVTWYMSWSPCFECAEQVVRFLATHHNLNLTIFSSRLYNVSDPDTQQKLCRLVQEGAQVAVMDLSEFKKCWEKFVDNDGQQFRPWKRLRTNFRYQNSKLQEIL

SEQ ID NO: 91 - protein, 221 aa, synthetic construct
  REGION 1..221: note = pYY-BEM3.23; tr|A0A2K5RDN6|A0A2K5RDN6_CEBCA polypeptide sequence
MWEAQSPGLSREWGSVAISPEDPGPLHIGRFLSCAFRHPMNAMYPGIFNFHFRNLRKAYGRNETWLCFTVEGIMNRSTVSWKSGVFRNQVGSDPFCHAEMCFLSWFRHNMLSPKKDYEVTWYASWSPCPECAGQVAEFLARHGNVRLTIFTAHLYYFWNPSFRQGLRRLSQEGASVLIMGYEDFEYCWDNFVYNDGQPFKPWKRLQDNSLSLYITLQEILQ

SEQ ID NO: 92 - protein, 206 aa, synthetic construct
  REGION 1..206: note = pYY-BEM3.24; tr|A0A2K5RDN7|A0A2K5RDN7_CEBCA polypeptide sequence
MEASPASRPRPLMGPRTFTENFTNNPEVFGRHQTYLCYEVKCQGPDGTRDLMTEQRDFLCNQARNLLSGFDGRHAERCFLDRVPSWRLDPAQTYRVTCFISWSPCFSCAREVAEFLQENPHVNLRIFAARIYDCRPRYEEGLQMLQNAGAQVSIMTSEEFRHCWDTFVDHQGHPFQPWEGLDEHSQALSRRLQAILQGNRWMILSL

SEQ ID NO: 93 - protein, 184 aa, synthetic construct
  REGION 1..184: note = pYY-BEM3.25; tr|A0A1C9CJ69|A0A1C9CJ69_CERAL polypeptide sequence
NPMKAMDPHIFYFHFKNLRKAYGRNETWLCFAVEIIKQRSTVPWRTGVFRNQVDPESHCHAERCFLSWFCEDILSPNTDYRVTWYTSWSPCLDCAGEVAEFLARHSNVELAIFAARLYYFWDTHYQQGLRSLSEKGASVEIMGYEDFKYCRENFVCDDGKPFKPWKGLKTNFRFLKRRLQEILE

SEQ ID NO: 94 - protein, 197 aa, synthetic construct
  REGION 1..197: note = pYY-BEM3.26; tr|A0A2R2Z4D2|A0A2R2Z4D2_PTEAL polypeptide sequence
MHLQVWRKVTEAWREGYTLKPWSRNPMERLYHDYFYFHFYNLPTPKHRNGCYICYQVEGTKKHSRMPLLRGVFENQESLDMMLSPGEKYRVTWYISWSPCFACVDEVIKFLREHTNVELIIFAARLYHSDILQYRQGLRKLHDAGVHVAIMSYYEFKHCLNDFVFHQGRSFCPWNDLNKNSKNLSNTLEDILRNQED

SEQ ID NO: 95 - protein, 206 aa, synthetic construct
  REGION 1..206: note = pYY-BEM3.27; tr|B7T161|B7T161_SHEEP polypeptide sequence
MTEGWAGSGLPGRGDCVWTPQTRNTMNLLRETLFKQQFGNQPRVPPPYYRRKTYLCYQLKELDDLMLDKGCFRNKKQRHAEIRFIDKINSLNLNPSQSYKIICYITWSPCPNCASELVDFITRNDHLNLQIFASRLYFHWIKPFCRGLHQLQKAGISVAVMTHTEFEDCWEQFVDNQLRPFQPWDKLEQYSASIRRRLQRILTAPT

SEQ ID NO: 96 - protein, 205 aa, synthetic construct
  REGION 1..205: note = pYY-BEM3.28; tr|A0A2R2X2G4|A0A2R2X2G4_PTEAL polypeptide sequence
MAGLGQACEGCCGQMPEISYPMGRLDPKTFSFEFKNLPYAYGRKSSYLCFQVEREQHSSPVPSDWGVFKNQFCGTEPYHAELCFLNWFRAEKLSPYEHYDVTWFLSWSPCSTCAEEIAIFLSNHKNVRLNIFVSRIYYFWKPAFRQGLQELDHLGVQLDAMSFDEFKYCWENFVDNQGMPFRCWKKVHQNYKSVLRKLNEILRRR

SEQ ID NO: 97 - protein, 309 aa, synthetic construct
  REGION 1..309: note = pYY-BEM3.29; tr|G1Q1M4|G1Q1M4_MYOLU polypeptide sequence
YAELSFLDLFQSWNLDRGRQYRLTWYMSWSPYPDCAQKLVEFLGENSHVTLRIFAADIHSLCSGYEDGLRKLRDARAQLAIMTRDELQYCWVTFVDNQGQPFRPWPNLVEHIKTKKQELKDILGNPMRRMYPKTFNFNFQNLNSYGRKSTFLCFEVETWEDGSVLDYQNGVFQNQLDPGHAELCFIEWFHEKVLFPDEVRCPDAQYHVTWYISWSPCFECAEQVAGFLNEHENVDLSISAARLYLCEDEDEQGLQDLVAAGAKVAMMAPEDFEYCWDNFVYNRGWPFTYWKHVRRNYGRLQEKLDEILW

SEQ ID NO: 98 - protein, 216 aa, synthetic construct
  REGION 1..216: note = pYY-BEM3.30; tr|A0A1S3AN78|A0A1S3AN78_ERIEU polypeptide sequence
RRIEPWEFEDFFDPRQFRPETCLLYEVRWGSSRNAWRSTARNTTRHAEVNFLERFAAERHFDKPVSCSITWFLSWSPCWECSQAIGAFLSQHPQVTLAIHVTRLFHHEDEQNRQGLRDLLARGVTLQVMGDSEYAHCWRTFVNSPPGAEGHYPRYPSDFTRLYALELHCIILGLPPCLEILRRYQNQFTLFRLVPQNCHYQMIPHLNFFVVRHYFF

SEQ ID NO: 99 - protein, 201 aa, synthetic construct
  REGION 1..201: note = pYY-BEM3.32; tr|Q4VUI3|Q4VUI3_XENLA polypeptide sequence
MTMDSMLLKRNKFIYHYKNLRWARGRHETYLCYIVKRRYSSVSCALDFGYLRNRNGCHAEMLFLRYLSIWVGHDPHRNYRVTWFSSWSPCYDCAKRTLEFLKGHPNFSLRIFSARLYFCEERNAEPEGLRKLQKAGVRLSVMSYKDYFYCWNTFVETRESGFEAWDGLHENSVRLARKLRRILQPPYDMEDLREVFVLLGL

SEQ ID NO: 100 - protein, 191 aa, synthetic construct
  REGION 1..191: note = pYY-BEM3.33; tr|E2RL86|E2RL86_CANLF polypeptide sequence
MNPLQEETFYQQFSNQRVPKPTYQRRTYLCYQLKPHEGSVIAKVCLQNQEKRHAEICFIDDIKSRQLDPSQKFEITCYVTWSPCPTCAKKLIAFVNDHPHISLRLFASRLYFHWRQKYKRELRHLQKSGIPLAVMSYLEFKDCWEKFVDHKGRPFQPWNKLKQYSESIGRRLQRILQPLNNLENDFRNLRL

SEQ ID NO: 101 - protein, 226 aa, synthetic construct
  REGION 1..226: note = pYY-BEM3.34; tr|G1LWB0|G1LWB0_AILME polypeptide sequence
SSAAPASIHLLDEDTFTENFRNDDWPSRTYLCYKVEGPDQGSGVPLGQDKGILHNKPAQGPEPSRHAECYLLEQIQSWNLDPKLHYGVTCFLSWSPCAKCAQKMARFLQENSHVSLKLFASRLYTRERWDEDYKEGLRTLKRAGASIAIMTYREFEHCWKTFVLHDQEGSCFQPWPFLHKESQKFSEKLQAILQVGVLLLSLPPPLPSSPLSSPWPFPAPLRASTG

SEQ ID NO: 102 - protein, 238 aa, synthetic construct
  REGION 1..238: note = pYY-BEM3.35; tr|A0A1U7S7K7|A0A1U7S7K7_ALLSI polypeptide sequence
MGEHWQYAGSGEYIPQDQFEENFDPSVLLAETHLLSELTWGGRPYKHWYENTEHCHAEIHFLENFSSKNRSCTITWYLSWSPCAECSARIADFMQENTNVKLNIHVARLYLHDDEHTRQGLRYLMKMKRVTIQVMTIPDYTYCWNTFLEDDGEDESDDYGGYAGVHEDEDESDDDDYLPTHFAPWIMLYSLELSCILQGFAPCLKIIQGNHMSPTFQLHVQDQEQKRLLEPANPWGAD

SEQ ID NO: 103 - protein, 220 aa, synthetic construct
  REGION 1..220: note = pYY-BEM3.36; tr|A0A2R2X2J8|A0A2R2X2J8_PTEVA polypeptide sequence
MPRIGNMNLLSEKTFNYHFGNQLRVKKPQGRRRTYLCYKLKLPNETLVKGYFINKKKNHAEIRFINKIRSLNLDQTQSYKITCYITWSPCSYCAGKLVALVKSCPHLSLQIFTSRLYYHWLWKNQAGLRYLWKINISVLVMKEPEFADCWDNFVNHQSRRFKPWEKLTQYSNSTERRLLRILRINRTDLFLAQSSEQDPGLNDLVDAIKRLFLDAHRPRD

SEQ ID NO: 104 - protein, 198 aa, synthetic construct
  REGION 1..198: note = pYY-BEM3.37; tr|A0A151P6M4|A0A151P6M4_ALLMI polypeptide sequence
MAVEEEKGLLGTSQGWKIELKDFQENYMPSTWPKVTHLLYEIRWGKGSKVWRNWCSNTLTQHAEVNCLENAFGKLQFNPPVPCHITWFLSWSPCCQCCRRILQFLRAHSHITLVIKAAQLFKHMDERNRQGLRDLVQSGVHVQVMDLPDYRYCWRTFVSHPHEGEGDFWPWFFPLWITFYTLELQHILLQQHALSYNL

SEQ ID NO: 105 - protein, 158 aa, synthetic construct
  REGION 1..158: note = pYY-BEM3.38; tr|A0A2K6MNR2|A0A2K6MNR2_RHIBE polypeptide sequence
IWLCFTMEIIKQCSTVSWKRGVFRNQVDPETHCHAERCFLSWFWEDTLSPNTNYQVTWYTSWSPCLDCAGEVAEFLARHSNVKLAIFAARLYYFWDTDYQQGLRSLSEEGTSVEIMGYEDFKYCWENFVYNGDEPFKPWKGLKYNFLFLDSKLQEILE

SEQ ID NO: 106 - protein, 182 aa, synthetic construct
  REGION 1..182: note = pYY-BEM3.40; tr|F1CGT0|F1CGT0_ANOCA polypeptide sequence
KAAILLSNLFFRWQMEPEAFQRNFDPREFPECTLLLYEIHWDNNTSRNWCTNKPGLHAEENFLQIFNEKIDIKQDTPCSITWFLSWSPCYPCSQAIIKFLEAHPNVSLEIKAARLYMHQIDCNKEGLRNLGRNRVSIMNLPDYRHCWTTFVVPRGANEDYWPQDFLPAITNYSRELDSILQD

SEQ ID NO: 107 - protein, 230 aa, synthetic construct
  REGION 1..230: note = pYY-BEM3.41; tr|C7AGG3|C7AGG3_HORSE polypeptide sequence
MDPQAPTQRGGLGQAYQGGDYVQAPGNGNTQHLLSEDVFKKQFGNQRRVTKPYYRRKTYVCYQLKLLRGPTIAKGYFRNKKKRHAEIRFIDKINSLGLDQDQSYEITCYVTWSPCATCACKLIKFTRKFPNLSLRIFVSRLYYHWFRQNQQGLRQLWASSIPVVVMGYQEFADCWENFADNRGNPFQSWEKLTEYSKGIKRRLQKILEPLNLNGLEDAMGNLKLGSVDLG

SEQ ID NO: 108 - protein, 197 aa, synthetic construct
  REGION 1..197: note = pYY-BEM3.42; tr|A0A250YMK7|A0A250YMK7_CASCN polypeptide sequence
MSLLKEDIFLYQFNNQQQVQKPYFRRRTYLCYQLEQPNGSRPQWPAKGCLQNKKGHHAEIRFIKRIHSMGLEQDQDYQITCYITWSPCLACACALAELKNHFPRLTLRIFASRLYFHWIRKFQMGLQHLYKSGVLVAVMSLPEFTDCWEKFVNHRQVFFTPWDKLEEHSRSIQRRLRRILQSWDVDDLTDDFRNLRL

SEQ ID NO: 109 - protein, 189 aa, synthetic construct
  REGION 1..189: note = pYY-BEM3.43; tr|B7T160|B7T160_SHEEP polypeptide sequence
MPWISDHVARLDPETFYFQFHNLLYAYGRNCSYICYRVKTWKHRSPVSFDWGVFHNQVYAGTHCHSERRFLSWFCAKKLRPDECYHITWFMSWSPCMKCAELVAGFLGMYQNVTLSIFTARLYYFQKPQYRKGLLRLSDQGACVDIMSYQEFKYCWKKFVYSQRRPFRPWKKLKRNYQLLAAELEDILG

SEQ ID NO: 110 - protein, 541 aa, synthetic construct
  REGION 1..541: note = pYY-BEM4.1; tr|A0A182D0J1|A0A182D0J1_BLAVI polypeptide sequence
MTNPESPPQAPCDFNEDALLNREPLRGSPIKFVSPVDYPDLVFALAGPVGVDIDYIQQSISDCLKSFDYSTEFIRITEIMQDIKCSKTIDCTDMLKEYQSKIEYANELRRAYRAKDLLAALTISAISKLREQIKERDEATNKSNIQPSRRKLAWVVRQLKTPEEVRLLRAVYGKQFVLVSIYSSPQRREDFLISKIKIKSRGTIDNNTSSEGAQRLIERDSKEDNEYGQNLSGTFCLGDIFVDSNNKESAIVSIDRFLNAFFGSNEISPTRDEYGMYLAKTASLRSCDLSRQVGAAIFSKTGEIISLGSNEVPKAGGGTYWTGDNADSRDIRLGHDPNEINKVEIFAEIISRLLEDKLLSNDLLNKDAASIVTILLSKNEGKRYKDLRVMDIIEFGRIIHAEMSAICDAARNGRAIIGATLFCTTFPCHLCAKHIVASGIGRIVYLEPYPKSYAKKLHSDSIQVEDHSDSEKVSFEPFIGISPSRYRELFEGGRRKDPFGEALKWKNDPRKPVIDVVVPPHFEAEKLVIAQLGKLIVSGTG

SEQ ID NO: 111 - protein, 330 aa, synthetic construct
  REGION 1..330: note = pYY-BEM4.2; tr|A0A2D6EXD2|A0A2D6EXD2_9ARCH polypeptide sequence
MIIGLVGTIGAGKQTIIDYLQEKYGYNALSCSDVLREILKKQGKPVTRDNLREIGNKTREEGGNGAIAKILLEKLRNNWKANYIVDSLRHPDEVSVLRTSPLFHLVAVDADLRIRFERVKARKREEEPTTLPAFVERDQKEMFGTGNEQRIRETMELADELVLNNGTVEELKQRIDDLNLVSDERLRPSWDDYFMRLARLAAQRSNCMSRKVGAIITKDRRVIATGYNGTPRGVKNCNEGGCERCNSAVAKGTAISECLCLHGEENAIIEAGRVRSEGATIYTSFLPCLWCTKMIIQAGLKEVVFSEVYDLHEASIKLFETSGVLIRRLK

SEQ ID NO: 112 - protein, 367 aa, synthetic construct
  REGION 1..367: note = pYY-BEM4.3; tr|F7YVM7|F7YVM7_9THEM polypeptide sequence
MNEFKYMSLALKLAKKGKYTTSPNPMVGAVIVKDGKILATGYHKKAGQPHAEINALSKLNFQAQNCEMYVTLEPCSHYGRTPPCADAIIRSGIRKVVIATLDPNPLVNGKGVEKLKNAGIEVVCGVLEEKAKKLNEKFFKYITTKIPFVALKIAQTLDGKIALKNGESKWITSEKSREYVHKLRMEYDAVLTGIGTILKDDPQLNVRLKKVYKQPLRIILDSKLKIPLSAKVLEDPSKVIILTTALADKEKLEELRSKGVEVIITNEKNGIVDLESALKILGEKKITSVMVEAGPTLLTSFLKESLFDKIYLFIAPKIFGADSKSVFSELGLEDISKSQKFSLESVKKIGEDLLLELYPKQLKKLEE

SEQ ID NO: 113 - protein, 449 aa, synthetic construct
  REGION 1..449: note = pYY-BEM4.4; tr|A0A3M6UNF1|A0A3M6UNF1_9CNID polypeptide sequence
MEEKSELENELMRSTSPKPSVPNGSKGNECEQRETRITKENLYMVLALWMEEFPVVEQTSSAKRLNKVGVVFVLPTDRVLAADCSRDGVHGVARVMVNHCGKLEGCKVFVSRKPCSLCAKLLVQSKVSRVFYLPIEPESENKGEIARADNLFKNSSVGQSVFVPCVEQKVLDKLEDKLPKEIITPDDISECRDNLLKKCGWSAEWFARAQASLPWPCFEGKMKSQVDNDFKSLIKWIAVVKAPMDKGVAFPKVKLTSDSRVVPDCDADNFPDSKTAYHMMIFAKMLARQTDDPKTGVGAVIVRGKVPDIVSLGWNGFPSKALYGEFPRASDDDRALQKKFPYVIHAEQNALMVRNVKDLTDGILFVTKPPCDECAPMIKLSGVKTIVIGEKIEKSRGGELSYNLIKEYIKEGIMTCYQMEATKTKAKRLASDPETRKRLKSSCSNSNDV

SEQ ID NO: 114 - protein, 414 aa, synthetic construct
  REGION 1..414: note = pYY-BEM4.5; tr|A0A2G3K826|A0A2G3K826_9BURK polypeptide sequence
MTKIIDDVNTAAAAVLDQATAAANQTTFAVGGVMVNNQTGEVISAIHNNVIIPLSNNVSFTFDPTAHGERQLVYWYYANKEALKLPEPNQITVITSLDPCAMCTGALLTAGFNVGVVAIDTYAGINCAQNFQFATLPANLRTKAQKNFGYYASGAANFKPLTRSYVGGPSVAFKNGVVTPANLRDCGTVFTQSVDTVRNTSNSTGLAPSQMSNPAELPSNSAILQAYRAIYKKAFTIKIDNPRLPDAQILTELKAVLADAPNARNAVAFIDPFGNLVLCMADAFNTSPVHAAFMNVTQEYAKTRWDLMNKYAQASTTDNPALYLTHPKYGTFVYLYAPDPDDSITIMSLGAYGSTMEGPIPNMFPSNLQFYYPPRNGAQFSELVPVVNELPPFYTQNVNISLMQVPGVTQAPTK

SEQ ID NO: 115 - protein, 308 aa, synthetic construct
  REGION 1..308: note = pYY-BEM4.6; tr|K1ZCJ4|K1ZCJ4_9BACT polypeptide sequence
MSSRAKKNRSTNLKKSIGQKSIENKPTDQKKDQVLVAYVPVIHEGYRRFFRHFPAVKELWLISQELSHELRSLQKDIRALKASETKKLLQTWGQFQKIKLLTPSSLAILQKTTTQLVFPDEEISHHLVEKYFAQNRVLFASFFLRWDKKSSLKKHDLQEYSEISNKEFDQMMIAIAQQEADKSDDWWRQVGGLIFKDETILLLAHNQHTPTEAEAYFAGDPRADFHQGEYLKISTAIHAEAYLIAQAAKQGISLEGADLYVTTFPCPVCAKQVAYSGIKRVFFREGYSLLDGETILKANGVKLIRVTV

SEQ ID NO: 116 - protein, 615 aa, synthetic construct
  REGION 1..615: note = pYY-BEM4.7; tr|A0A1G3PNQ8|A0A1G3PNQ8_9SPIR polypeptide sequence
MRDLPLLVLGLTGPMGAGCTRFARDISKMEPGKVIKKQGLLDQVAHEISELSKKASEIRLQCISNGKNSELAELKRLNRRLNAKLAERACLHVIAKSSLPEPLFISLNTIVIKIAVDSITAPEFAEWAKNHAKVADLLKWLRTQWESELTLYETWGQDAGRFSQDELEKMDAMFAEFERIGDEILKEDFETYFGKRNNDFSIRMFSENIRLSGNPFRPAENGGGGGKYDEPSMVMIARETDRYIRFYRTRSDQKRSHFFIIDEIKNPREAEYFRARHQNFFLVSIFSSSEIRASRMRRGLGHDAGVSDADFQHLFRELDSRDWGADDFDAHGLHRQNIYRCFNLADIAINNDVEDERFSEVLFNKFIRYYALMLSPGCVQPTPQETYMHLAYSLSLRSTCISRQVGAVITDLEDRILSLGWNEVPEGQIGCGLKVKKDYTDKENPLFEMEIWDNVITAEDLAVWDDEDSICVKDILSRIEIKTKLKSVSLTPEERADVLKALRIKRLEYSRSLHAEENAILQVASRGGVGLKDGTIYVTTFPCELCSKKIYQVGISKIYYTEPYPNSISEKVILKDGIRNIKILQFEGVKSYSYFKLFKPGFDKKDAQMLEGRGI

SEQ ID NO: 117 - protein, 291 aa, synthetic construct
  REGION 1..291: note = pYY-BEM4.8; tr|A0A1G0PGF4|A0A1G0PGF4_9BACT polypeptide sequence
MKHNNQLRKEIEKLLGQNSIIKNDELKKLQKEYKIETDELLISFLPYAAEFAKVPISKYKVGAVVLGKSGNIYFGSNMEFEAGALSATVHAEQSAVNNAWLNGETGINKIAVTAAPCGYCRQFLNELTTAKQLHVLLKDKNLEAAKVFKLTELLPEAFGPRDLEIEGGLMKVENHKLKIENINDELINAALEAANKSYAPYSKNYSGVSIQLSDGTIFSGRYSENAAYNPSLLPFQSALAFMNMNTKKGSNNKIVDAVLVEAVSNISQKDAAGTLLNSISKTKLRYYKIKN

SEQ ID NO: 118 - protein, 398 aa, synthetic construct
  REGION 1..398: note = pYY-BEM4.9; tr|A0A0P4WGY5|A0A0P4WGY5_9EUCA polypeptide sequence
MEENSSATSQPKCASRTKQGGNDLSTDMSNLSVGETKRTDFLPWDDYFMAVAFLSAMRSKDPSSQVGACIVNADKKIVGIGYNGMPIGCSDDELPWNKESLDPLQTKYMYVCHAEMNAIMNKNSSDLAGCCVYVALFPCNECAKLVIQAGIREVVFFSDKHQQKPETVASKKMLNMAGVAYRQYTPSQSKIELNLSLKEQEKSEPTADITQSSERDQNSKRKDYLSWEEYFMAMAHLSALRSKDPITQVGACIVNSKKKIVGIGYNGMPLGCNDDLMPWGNSSSNKLETKYMYVCHAGVNAIMNKNSCDVSGCTLYVALFPCNECAKVIIQAGIKTIIYASDTNKDQASILASKKMLDMAGIKYRADNLSQRKIVIDFKTIDWNSRFMNDHQNDPTCL

SEQ ID NO: 119 - protein, 259 aa, synthetic construct
  REGION 1..259: note = pYY-BEM4.10; tr|A0A3D8IG27|A0A3D8IG27_9HELI polypeptide sequence
MRKNILYFILTLFFLSGLYATSLPEDNVVSGVIYEKIDTVSAEVDHIYPMLALAIVYKDWQEKNMLNKQGHNIGLVIVDENNMPVFWVRNSVHATHNGTQHGEVRLVSNLLNCEGFNKYLDKYTLYTTLEPCIMCAGMLSMVQIPKVVYAQKDLSCGNTQEIISTAKYPRYYKAFTVENGYKKDLEECFEQYKICKNDSITDFLVNDSAKEIFRKASNDLQDYKVKFKENRRVIKVAQEFLQNIQTKDNLDVLQCPKNM

SEQ ID NO: 120 - protein, 256 aa, synthetic construct
  REGION 1..256: note = pYY-BEM4.11; tr|A0A351C8C4|A0A351C8C4_9BACT polypeptide sequence
MNELTKQSEHLRNEALRIATRSYVPYTGQQEGVIILLENGDLIPGVRVENASFQLTIPALQNALSTMYALQRTDISMIVSSIPFTDSDLAYTGGMAEIAWEMVGASLLLVAGAHIPEAGTFIDPARGENLLDVSREAALNAFIPESDFPVGSAIQTSDDVVIDGCNVEHSDWSKIICAERNVLSTARSYGLGQITTIYVSCPKEPGGTPCGACRQVIVELAPDATVWMDRGNQEPIAMKATKLLPGHFTGNVLKKQ

SEQ ID NO: 121 - protein, 301 aa, synthetic construct
  REGION 1..301: note = pYY-BEM4.12; tr|A0A1G6V2K7|A0A1G6V2K7_PEPNI polypeptide sequence
MPIVRVNEIGARLPEDWEALETAIWQAYVSREDLPDAGELDLTLVDDATIQELNKTHRQLDKSTDVLSFPMYDDRDDLAADVQAGLPVILGDIMISVPTAERQAQAYGHSFKREMAYLLVHGLLHIAGYDHMSAEEKSAMRRAEEAILADVDVPRDTAPSKTAAVLDEADVQALIDAARAARLQAYAPYSGYAVGAALLAADGRRFCGVNVENASYGATCCAERTALFAAVTAGARDFIALALVTEGDEPAPPCGLCRQALAEFSPDLAIYLAGPTGETYRRTSLAALFPEAFSLSTKESV

SEQ ID NO: 122 - protein, 528 aa, synthetic construct
  REGION 1..528: note = pYY-BEM4.13; tr|F2NP91|F2NP91_MARHT polypeptide sequence
MPVMETHALEARFKEALARLCPEGRLLAAVSGGGDSVALLYLLKAAGRDTIVAHLDHALRPDSAADAAFVEKLAQRLGFPLETEHVDVRALAHRKRINLEAAAREVRYAFLARVARRWKARCILTAHTLDDNAETVLLQILRGAGRGLGIRPLQRRVARPLLEFSRAELRAYLEARGARWLEDPTNRSLELDRNYLRHAVLPRITARFPHALEALARFSQAQQADDWALEALSARHLIPDRRWPVPAYRALPLERAPEALRRRAIRGVLEALGVRPEARLVADVEAALGGRAQTLPGGVVVRRQRGTLFFIPPTVRFPKVQPPAGLEARPPRPGDYLVFPYGRKRLVDFLNERGVPRELKRRWPVGAVGAEVRWVYGLWPEPDEDRYMRRALVLARAAARQGEVPIGAVLVRDGAVLAEAANAVEASRDATAHAELLALRTALRRVGEKVLPGATLYVTLEPCPMCYGAILEARVARVVYGVENLKAGAFTVHGLEPRVALEAGRVEGECAKVLKDFFARLRPGRDGA

SEQ ID NO: 123 - protein, 226 aa, synthetic construct
  REGION 1..226: note = pYY-BEM4.14; tr|A0A316TX77|A0A316TX77_9BACT polypeptide sequence
MINGYTPYSGNQNTCYVKGESGTFYPGVRIENVSYPLTISSVQAAVCSCLANSDNPVEYYTGDHQPELLQVWADEYDMKPGGKLPDSPLKLFDPLVPSIPDIKKELDVLTEKSVTPNSGFPVSALLQTEKGYIRGVNIELSSWALGLCAERVAISRALTAGYTQFKSIHIYAPEADFVSPCGACRQVLLEVMPDADTELYHGDGTLSKHIVSDLLPFGFTSHKLKK

SEQ ID NO: 124 - protein, 321 aa, synthetic construct
  REGION 1..321: note = pYY-BEM4.15; tr|R6VYG3|R6VYG3_9FIRM polypeptide sequence
MIHKGTQTIETKRLILRAFTPDDAEAAFENWMSDPKVTEFLRWKTHADISDSRKIVNEWANGSADPEFYQWAIVPKDVNEPIGTISVVDRNDALGIFHIGYCIGSKWWHKGITSEAFSAVIHFLFEEVGANRIESQHDPENIHSGDVMKKCGLTFEGTLRQADFNNRGIVDACVYSILQSEWQNNTSVWQRLYNAALTVQNDRVVSPFIDAGGVAAALMTKKGNIYTGICIDTASTLGMCAERNAVANMLTNGESRIDKIVAVMPDGKVGAPCGACREYMMQLDRDSGDIEILLDLETEKTVRLKDLIPDWWGAERFGDTE

SEQ ID NO: 125 - protein, 229 aa, synthetic construct
  REGION 1..229: note = pYY-BEM4.16; tr|A0A3C1HZ18|A0A3C1HZ18_9BACI polypeptide sequence
MGDIMENWNELSEPWKRCFLQAWKAYCHGSIPIGAVLVDSEGEIFLEGRNRVHELTAPEGQLCDCRIAHAEMNVLVQVKTSDYEKLSGATIYSTMEPCIQCFGAIILSRIKNISFAAIDDKLAGATTLEDRHGFIKSRNLNIAGPFSHLGEIQIILRTDFLLRIFDSEYADPLIAAHEKDYPIGVALGRHYHRNNRLQVAKKETIPFGELFNEFSFDIKRAREGYTLGK

SEQ ID NO: 126 - protein, 205 aa, synthetic construct
  REGION 1..205: note = pYY-BEM4.17; tr|A0A1M6KV24|A0A1M6KV24_9BACT polypeptide sequence
MEASQQNILLKIEGKGPVAEINFTVTLPEWLVEQVQSGSTVFLTQKEKMRFVLELARKNVAQETGGPFAAAVFSLESGELVSAGVNVVVESRCSSAHAEVVALSLAQKAVDSHDLGAAGLPRMVLVSSAEPCAMCMGAIPWSGVKQVICGARDEDVRSVGFDEGAKPLEWVEDFAERGIEVIRDVLREEATEVLWDYRERGGEIY

SEQ ID NO: 127 - protein, 207 aa, synthetic construct
  REGION 1..207: note = pYY-BEM4.18; tr|A0A2U0T9B4|A0A2U0T9B4_9RHIZ polypeptide sequence
METAELISRLLDVIEKDIAPVTAKGVARGNKLFGAAILKKSDLAVIVAETNNEIENPLWHGEMQAIKRFFELPADQRPATRDCLFLATHEPCSLCLSGITWSGFDNFYYLFSHQDSRDGFAIPYDIQILKSVYAVPEPETGTVSPARDLYNRSNDFWTSHGLQDMIAGLARSNREALLARIDDLNALYAELSERYQRDKGGKGIPLP

SEQ ID NO: 128 - protein, 231 aa, synthetic construct
  REGION 1..231: note = pYY-BEM4.19; tr|A0A2K9PN08|A0A2K9PN08_9FLAO polypeptide sequence
MSDKKESKIKISKTSESIELDEIHSLLSYSIVQKFWENDDRNGRGYNVGVILVDENKNIVDWDINSVNKTENSTQHGEMRLISRYLDKDELYSLKGYTMYPTLEPCAMCAGMMTMTNVYRTVNGQMDYFYSKALERLSIDTRECGGYPPYPRTVISEISPSSISTRLDAEYKQYTNAGNKPIITKFLSTYKAKTIYDDAFNQFINFKCKFPENKTKYENAIKFYNSLPESI

SEQ ID NO: 129 - protein, 330 aa, synthetic construct
  REGION 1..330: note = pYY-BEM4.20; tr|F4PWM7|F4PWM7_CAVFA polypeptide sequence
MRFSLSLLFVILSVLLAGVLACKDPYNPETVDYGQCASATKANYEVRSDSKVLTPADLPADELAVHESRMRHIIDIARVNNKKFVSSIYFPNGTLACIGINTGKPNMIAHGEIVAIQNCTEIHGISMYTNYSIYTTGEPCSMCASAILWSRFKTVVWSTYNSDLYCKICMSNIPIDSSYIFSRAYGLGIEAPVAIGGVVKAEGDAWFGTYCNRPTSIYYIAPKCACQDPAKVSPLKFTQTRTTVWVEGGDKVVTQWNAIISNPSNSTIVDPPIVISPSVVFKGAPWGISAASEPNTYKLSYNKVLFPGQTFSFGYSVYGLEEVAFTALEA

SEQ ID NO: 130 - protein, 193 aa, synthetic construct
  REGION 1..193: note = pYY-BEM4.21; tr|U7QZM1|U7QZM1_PHOTE polypeptide sequence
MNKTRRKLLATLGIMSISMSFIAQAGEKKTQVINNILSKQEITEHEKYMREAIKEAIKNPKHPFGAVIVNRNNGEILSRGVNTGRNNPILHGEIQAINHYITQYGNQGWENVALYTTGEPCSMCMSALVWIGIREVIWATSISVIRNSGIRQIDISAHEIAERASSFYNPITLVGGILANETDKLFLERKRGN

SEQ ID NO: 131 - protein, 319 aa, synthetic construct
  REGION 1..319: note = pYY-BEM4.22; tr|A0A081CH48|A0A081CH48_PSEA2 polypeptide sequence
MASRRHLLATQVTGNHRKLSLWHLRGWLSPYTKLVDAVYFLTTNSFYHSLQTPPVQSITMLLSSIITSLALAAQASAYREGLHPEFQSGLSINSVPATDRDHWMRLANSAIYYPPVSHPCPQAPFGTAIVNTTSNELICAIANRVGSTGDPTQHGEITAIQHCTNVMRKKGLSPQEIIAAWKQLSLYTNAEPCTMCLSAIRWAGFKEVIYGTSVGTISENGRNQIYIPSNLVLEKSYSFGHATLMLGNILTHETDPFFQHQFNESAPCPVGCERTQVGEARVKTCEPVPNWQKLVRLEYSEDSRVGSEPVAHTPLHLEL

SEQ ID NO: 132 - protein, 203 aa, synthetic construct
  REGION 1..203: note = pYY-BEM4.23; tr|A0A3D3HMU1|A0A3D3HMU1_9GAMM polypeptide sequence
MDYSDAILGAITSIRRNSKQPGVNVTDNVTDSSTQYNNDEYWMRRALALAREAGEAGEIPVGAVLVKDNQQVAGGFNQPIRSHDPAAHAEILTLREAGAVLGNYRLIDTTLYVTLEPCMMCAGALVHSRIKRLVFGAAEPKTGAAGSFIDLLTLPRLNHYMEVTGGVLGEECSVLLSDFFRRRRAEKKALKRQNSESGSDSAS

SEQ ID NO: 133 - protein, 270 aa, synthetic construct
  REGION 1..270: note = pYY-BEM4.24; tr|A0A1N5WT13|A0A1N5WT13_9ACTN polypeptide sequence
MLEKIERRLVAAAEAVVRSPSTGDAHTVAAAAMDANGDIYSGVNVFHFTGGPCAELVVIGSAAAANAPPLITIVAVGDGDRGVIAPCGRCRQVMLDLHPDVFVIVPTGDGQLAAKPVRELLPFGYVARTGSTAPRVVYFHPRHYDTISSGLKTATVRFQDSVQTGPAVFVFDDGESIRRLDAVVEKVESRRLDHLTEEDAHHEALPDSDALRDAIKTQYPMLGDGDVVDVATFRLTAISAPDPDPRSSYPPAVSRCNPAGPRADLLVGQS

SEQ ID NO: 134 - protein, 257 aa, synthetic construct
  REGION 1..257: note = pYY-BEM4.25; tr|X0SAC5|X0SAC5_9ZZZZ polypeptide sequence
MTKDGRVIASAHDTEVTDQDSTAHAEINAIRKASKIYRKDLTGCLIISTHEPCPMCTGSIIWSNISKVVYGVSIRDSIKAGRDMINLSCKEIIKKPNAEINIYDGILKKECLKLYNNDTRKLVKKFRKYEWINIEENLLNKRMQWFENNKTMIRKLKGNDLEKAYHLILMKIGIKRSEAPIVKKSESKIIFHSKNYCPSLEACIILDLDTREVCKEIYERPTEELIRRLNSKLRFTRNYDCIRPYSDYCEEIIILEK

SEQ ID NO: 135 - protein, 154 aa, synthetic construct
  REGION 1..154: note = pYY-BEM4.26; tr|A0A3B8IC10|A0A3B8IC10_9BACT polypeptide sequence
MPSHEDFIHQCLELGKEALLQGNPPVGSVIVWQDQVIGRGIENGRSSGDITQHAELLALQEAVATGQRDKLKEAIIYSTHEPCVMCAYPIRQYKIPTVVYSVAVPELGGHTSSWHLLTTEDVPKWGKAPKIITGISAEEVEALNAAFQDSLKKG

SEQ ID NO: 136 - protein, 180 aa, synthetic construct
  REGION 1..180: note = pYY-BEM4.27; tr|A0A2N9P8B9|A0A2N9P8B9_9FLAO polypeptide sequence
MFIFKLISPPVSIEVYQDKIIQKLYICFMENIFTDEYFMKKALQEAETAFQQGEIPVGAVIVIDNRIIARSHNLTEMLNDVTAHAEMQAITASANFLGGKYLKDCTLYVTLEPCQMCAGALYWSQISKIVYGATDEQRGYRAMGAQLHPKTKVISGIMQNECTHLMKDFFKQRRSKSTKD

SEQ ID NO: 137 - protein, 178 aa, synthetic construct
  REGION 1..178: note = pYY-BEM4.28; tr|K1KX30|K1KX30_9BACT polypeptide sequence
MVKNPVNNNELYFGKHSEIPMNEEQKAYMKMAVDLSRSGMESGKGGPFGCVIVKDGKVIGIGSNSVLETNDPTAHAEIVAIRDACRNLGHFQLDGCEVYTSCEPCPMCLGAIYWARPSKVFFANDKRDAAEAGFDDDFIYQELELPYEKRKIPFEQGMQDTAKEVFQEWILKEDKTLY

SEQ ID NO: 138 - protein, 196 aa, synthetic construct
  REGION 1..196: note = pYY-BEM4.29; tr|R4XI84|R4XI84_TAPDE polypeptide sequence
MSSEIEPPSTDVHKHAVAEAADESGAADAFMQIALQQAETALLNKEVPVGCVFVHQPTGTVLATGANQTNASLNGTLHAEFVAIESILRDHPPSIFRESDLYVTVEPCVMCASALRQLQVRKVYFGCGNDRFGGCGSVFSIHSDASKTGDAAYMVESGIFRKEAIMLLRRFYLLQNESAPKPALKSTRVLKEHFDE

SEQ ID NO: 139 - protein, 212 aa, synthetic construct
  REGION 1..212: note = pYY-BEM4.30; tr|A0A239CVF7|A0A239CVF7_9DELT polypeptide sequence
MSPASKKHFPSLFSFLLLTIGLICGTAHAQPQGHTADDTAATLANASLKEHEPFIRRCYQLAIDAGKKGNHPFGALLVHKGKIVLEAENTVLTDNDFTNHAEMNLIAEAARTLSRQIIPEATVYTSCAPCAMCTATLAMAGFTRIVYGVSHDALNKRFGLKGKSVSCPALFKTMGMELEFVGPVLEKEGLRVFDFWPEKDPHAQMLKKQARK

SEQ ID NO: 140 - protein, 320 aa, synthetic construct
  REGION 1..320: note = pYY-BEM4.31; tr|A0A1Q3NME1|A0A1Q3NME1_9BACT polypeptide sequence
MTEFNYDWAKLAFSSKRPLTNLKATFIIAPREISEKRFTQLLKEYLPKGDILLGISKEDYVEGLEGQPQFAMLQQKTLQKLIDKVNDASAHKVYTLRYFQRELPAIIEKLTPPRVVGIHGSWHHSFHTLPIYYLLSEKRIPYQLVAAFSDEDEARAYEVATDKKIVRPTLEGSFDDTTVLQLTDEVAKSSYDYGFQTGAILAEKVNGVYQPVAAGFNKVVPYQTYALLNGASRETNFSPANDMNHYDTIHAEMQILVEAAKQGISLKDKTLFVNLMPCPSCARTLSQTELSEIVYRIDHSGGYAVDLLTKVGKDIRRIVY

SEQ ID NO: 141 - protein, 180 aa, synthetic construct
  REGION 1..180: note = pYY-BEM4.32; tr|A0A2G6N4N7|A0A2G6N4N7_9DELT polypeptide sequence
MKERTVSYSDRHFMAEALEMAESALTQGEFPVGCVIADGTAVVARGHRTGTTAGAVNEIDHAEINALRHLGLAGEHLDRTDLTIYSTMEPCLMCFAAIVLSGINRIVYAYEDVMGGGTGCDLTGLPPLYRDAPLTLVAGVRRRASLNLFRRFFTDPENGYWAGSLLSRYTLNQTKDSHRL

SEQ ID NO: 142 - protein, 156 aa, synthetic construct
  REGION 1..156: note = pYY-BEM4.33; tr|A0A0G0RBB8|A0A0G0RBB8_9BACT polypeptide sequence
MQSVQYNKLTHLQRRALDEAEQVLENSYNPYSHFYVGACLISEDEQLIAGTNFENAAYGSAICAERAAVLRANAMSIRRFRGIAIIARGEDFNTTEVTGPCGSCRQVLYEISQVSGCDLQVILATSKKDKIVITTIRELLPLAFGPLDLGVDIGKY

SEQ ID NO: 143 - protein, 217 aa, synthetic construct
  REGION 1..217: note = pYY-BEM4.34; tr|A0A327L2Q5|A0A327L2Q5_9RHIZ polypeptide sequence
MVTSRDGEDEAMMARCVALSRIAVGKGEYPFGAVVAREGRIVAEAINRTIRDGDVSRHAEVIALARAQKAIGRRELRECSLYSNVEPCAMCSYCIREAWVGRVVYALGSPVMGGVSKWNILRDDGLSGRMPQVFDAAPEVVSGVLVEQAQAAWRDWSPLAWEMITLRGLMTDPSARPECRTRAARPRSLWHHLVALIERPPRPYVDPTSAAEGHADL

SEQ ID NO: 144 - protein, 162 aa, synthetic construct
  REGION 1..162: note = pYY-BEM4.35; tr|S2DR30|S2DR30_9BACT polypeptide sequence
MKMKKKIEITVSLEVIQKSEWSKEDRSLIERAIHAVEHAHAPYSNFMVGTALLLDNGQIFSANNQENVSFPVGICAERAVLSYAMGNFPNNRPVKLAVVAKRRSDSTWATVTPCGLCRQTINEYEVKFGHPIEILMLNPGEEILKASGIDQLLPFRFNDLNS

SEQ ID NO: 145 - protein, 153 aa, synthetic construct
  REGION 1..153: note = pYY-BEM4.36; tr|A0A369QGF1|A0A369QGF1_9BACT polypeptide sequence
MEEHEKWMHWCLNLAQQALQQGDFPVGAVVVQKGKLIGQGVEAGQLKKDITCHAEMEAIRDARQTINTADLQNCILYSTHEPCIMCSYVIRHHKISRVVVGTTVPEVGGSSSAYPLLSAPDISIWVAPPHLVTGVLAEACQALSQAYKQKFKK

SEQ ID NO: 146 - protein, 159 aa, synthetic construct
  REGION 1..159: note = pYY-BEM4.37; tr|A0A1W6X4U4|A0A1W6X4U4_9RHIZ polypeptide sequence
MTNPSRQERWDRRFLELAKVFGTWSKDRSAGTGCVIVGPDRLLRASGYNGFARGIDDEVPERHERPAKYSWTEHAERNAIYNAAKLGISLDGCTAYVNWFPCIDCARAIVQAGIVRLVGLHPDHADQRWGSEFKFATEMLRESGIEIILYDIPELAARK

SEQ ID NO: 147 - protein, 490 aa, synthetic construct
  REGION 1..490: note = pYY-BEM4.38; tr|A0A238BW09|A0A238BW09_9BILA polypeptide sequence
MEEMARKIRTKAKKANSYCNTMTFLISKASIVLLKAECKRIELTVVIFRFLIKMNASEPNNELCDMTVIKSMLKITHVIFDLDGLLIDTEVVFSKVNQCLLSKYNKKFTPHLRGLVTGMPKKAAVTYILEHEKLSAKVDVDEYCKKYDEMAEEMLPKCSLMPGVMKLVRHLKTHSIPMAICTGATKKEFEIKTRYHKELLDLISLRVLSGDDPAVKRGKPAPDPFLVTMDRFKQKPEKAENVLVFEDAANGVCAAIAAGMNVIMVPDLTYMKIPEGLQNKINSFSDNLIISNDLNVALMSLKKELSEEEVHFLNRAFEIAVDAVLNNEVPVGCVFVFEGQEVAFGRNDVNRTKNPTYHAEMVALKMMKQWCMDNGRDLEEIMRRTTLYVTLEPCIMCASALYHLRLKKILYGAANERFGGLVSVGTREKYGAKHFIEIMPNLSVDRAVKLLKEFYEKQNPFCPEEKRKVKKPKKSGNNNDNSDDAVALNV

SEQ ID NO: 148 - protein, 159 aa, synthetic construct
  REGION 1..159: note = pYY-BEM4.39; tr|A0A1J5H6Z0|A0A1J5H6Z0_9BACT polypeptide sequence
MAYQPSEKFMQMAIDKTREGVLSGQTPFGACIVKDGKVVACEHNTVWQDTDITSHGEVHTIRAACKAIGSIDLSGCILYSTCEPCPMCFSAIHWARIDTVVYGAFIADAQDAGFNELTISNEKMKEFGGSPVNFISGFMRDENVALFKLWKEQGANNVY

SEQ ID NO: 149 - protein, 168 aa, synthetic construct
  REGION 1..168: note = pYY-BEM4.40; tr|A0A3C2D945|A0A3C2D945_9BACT polypeptide sequence
MKTTEIRIIVHEYQNIDELTENDQYLLHEARRITEFAYAPYSGFHVGAAILLGNGMIVKGNNQENSAYPSGLCAERVALFYANANYPDSEVKTIAISAAKNGILVNDPIKPCGGCRQTLSEAEVRFGSPIRIILDGQDSILVLHGVESLLPLSFSKKDLASPLAATGR

SEQ ID NO: 150 - protein, 214 aa, synthetic construct
  REGION 1..214: note = pYY-BEM4.41; tr|A0A1I7EYS3|A0A1I7EYS3_9BURK polypeptide sequence
MKFKLDPSRPPDEDDYYLGVALAVRRKANCTGNRVAAVIVKNKRVIATGYNGVPEDMPNCLDGGCLRCSNPGGQFKSGTRYDLCICVHAEQNALLTAARFGISVEGAHLYTTMQPCFGCAKEILQAKIEKVFYLHPWVPTDVDPVMDAAMKAEYAKIIGKLKVKKLDFDDPVATWAVTTMRQAALASDKNPDKKTPPKTAKKKVAKKKSRTSPR

SEQ ID NO: 151 - protein, 155 aa, synthetic construct
  REGION 1..155: note = pYY-BEM4.42; tr|H8GQX8|H8GQX8_METAL polypeptide sequence
MNHEHFMRRAIELARQAPQYPFGAVIVRRDDGQCVGQGFNRSDLNPTYHGEMVAINDCAVRHCAEDWRGFDLYTTAEPCAMCQGAIEWAGIGRVFYGTSIPYLQKLGWWQIDLRAAEVSARAVFRDTLIVGGILETECNALFAAARRGCFGTGSE

SEQ ID NO: 152 - protein, 156 aa, synthetic construct
  REGION 1..156: note = pYY-BEM4.43; tr|A0A0S8HZN3|A0A0S8HZN3_9CHLR polypeptide sequence
MDEHDIRFLRASFDVARNARKNGNHPFGALLVDEHGRIVMEAENTVITAKDCTGHAETNLMREASSKYDSDFLANCTIYTSTEPCPMCAGAIFWSNVRRVVYGLSEESLYEIAGRGSEEVLFLSCREIFERGKKLIEVIGPLLEDEAREVHMGFWR

SEQ ID NO: 153 - protein, 193 aa, synthetic construct
  REGION 1..193: note = pYY-BEM4.44; tr|E3SF31|E3SF31_9CAUD polypeptide sequence
MKPTTVLQIAYLVSQESKCCSWKVGAVIEKNGRIISTGYNGSPAGGVNCCEHAEEQGWLLNKPKPVLIPGHKSECVRFSQVDRFVLAKAHREAHSAWSKNNEIHAELNAILFAARMGSSIEGATMYVTLSPCPDCAKAISQSGIKKLVYCETYDKNIPGWDDILKNAGIEVFNVPKRSLDKLNWENINEFCGE

SEQ ID NO: 154 - protein, 330 aa, synthetic construct
  REGION 1..330: note = pYY-BEM4.45; tr|F8AAC6|F8AAC6_THEID polypeptide sequence
MIRAPWHEYFMLLAKIVALRSGCNSRPSGAVIVKNKRILATGYNGPMPGAWHCTDRGPGYCFRREKGIPDIDKYNFCRATHAEANAIAQAARFGISVEGASLYCTLAPCYVCLKLIASAGIKKVYYEHDYGSRDFERDQFWKEAIKEAGLEKFEQITVSQEVMEQLQEILPYPTSKRRLAPTEFLDEFEDGKKYGVPSIEVLFNKLNYLTRQALKDITFVIEKTTVTEEPEGISFYLSGKMVELSELINTVKKQINADQNFYFLAKHNAIEAKIEILREAENIRLKAFLNECPLESFKRIAESLDYILYQVSNSLSLPTRLELSVNLLRI

SEQ ID NO: 155 - protein, 158 aa, synthetic construct
  REGION 1..158: note = pYY-BEM4.46; tr|A0A2H4ZNK4|A0A2H4ZNK4_9EUKA polypeptide sequence
MKKQLSRKIQEEWMSRLLRNAYDAGTYGEVPIAAVILNESGQCIGWGRNCREKDQNPLGHAEIIALRQASYLKKSWRFNECTMLVTLEPCPMCAGALLQARINHIIYGASDYKRGGFGGVLDLSKNSSAHHKIEITRGVKSIQSCQLLETWFRRRRRV

SEQ ID NO: 156 - protein, 176 aa, synthetic construct
  REGION 1..176: note = pYY-BEM4.47; tr|A0A239N5N1|A0A239N5N1_9PSED polypeptide sequence
MEGRAGIIPFDEGGAAMGPAEEDSPMQHLAYMREALALARANVEAGGRPFGAVLVRDGEVIARAANGTHLDHDPTAHAELLALRAAGRALGSPRLDGCVVYASGHPCPMCLAAMHLSGVSAAYYAYSNADGEPYGLSTAAVYAQMAQPVEWQSLPLQALRPEDEEGLYGFWRERRP

SEQ ID NO: 157 - protein, 199 aa, synthetic construct
  REGION 1..199: note = pYY-BEM4.48; tr|A0A328VTR2|A0A328VTR2_9PSED polypeptide sequence
MHPEHLALLQQAPASTHADDTWARLCCEQALLAVEEGCYAVGALLVDGAGELLCSGRNQVFAPAYASAAHAEMRVLDQLEAEHAQVDRRSLTLYVSLEPCLMCYGRILLAGITRVRYLARDRDGGFALRHGRLPPAWANLASGLSVVQAKADPYWLDLAEHAIGRLQDRQTLRQRVIRAWRGQRTLTDEFSSTKRTHSG

SEQ ID NO: 158 - protein, 402 aa, synthetic construct
  REGION 1..402: note = pYY-BEM4.49; tr|A0A103YG48|A0A103YG48_CYNCS polypeptide sequence
YIRELHASSLRRDEHEIQNPKILVIVDRLSSPSLHVSLSLSLSLVIFPPFIPLNQTPTHMENAKVVEAKDGTIAVASAFSGHQEVVQDRDHKFLTRAVEEAYKGVECGDGGPFGAVVVHKDEVVASCHNMVLKHTDPTAHAEVTAIREACKKLNKIELSDCEIYASCEPCPMCFGAIHLSRIKRLIYGAKAEAAIAIGFDDFIADALRGTGFYQKAHLEIKQADGNGAMIAEQVFEKTKAKFAIDHKFLTRAVEEAYKGVECGDGRPFGALVVHKDEVVVSCHNMVLNYTDPTAHAEITAIREACKKLNRIELSDCEMYSSCEPCPMCFGAIQISRIKRLVYGAKAEASIASGIPIGDFISDALKGTGFHEKANFEIKQADGNGAMIAEQVFERTKAMFPKR

SEQ ID NO: 159 - protein, 195 aa, synthetic construct
  REGION 1..195: note = pYY-BEM4.50; tr|W5M1M8|W5M1M8_LEPOC polypeptide sequence
NSSTRESRVMAQMEINGGASPPKKPGKGQSAADQDMITGLINKALQAKEFAYCPYSNFRVGAALMTNDGRVFTGCNVENACYNLGVCAERTAILKAVSEGYESFRAIAVSSDLQDQFISPCGACRQVMREFGTGWDVFLTKVDGSYVRMTVDELLPMSFGPDDLKKKKVFSLQNGHEVSTQFYTHSPCEAGENNN

SEQ ID NO: 160 - protein, 134 aa, synthetic construct
  REGION 1..134: note = pYY-BEM4.51; tr|A0A3N5YPZ2|A0A3N5YPZ2_9ALTE polypeptide sequence
MSNSETEHIQALVDAAQAAQKQSYSPYSSFQVGAAIFADDGNTYSGCNIENVAYPLGQCAEATAIGMMIMQGAKRIEDIMIASPNDQVCPPCGGCRQKISEFGTAETKIHMVTRSGEVSTVTLGELLPLAFDSL

SEQ ID NO: 161 - protein, 162 aa, synthetic construct
  REGION 1..162: note = pYY-BEM4.52; tr|A0A2A9NC86|A0A2A9NC86_9AGAR polypeptide sequence
MTNSTLSNEDRTRLIQGAFQARKKTYSPYSNFPVGAALLTTDGRIIEGANIENASYGGTICAERTAIVKAVSDGYRHFAGIAVTTKMPTRVSPCGICRQVLREFCSLDMPVLLVPGDYPQRNPVDDDGADKPGVITEGGVRETTLGALLPDSFGPENLPPRA

SEQ ID NO: 162 - protein, 163 aa, synthetic construct
  REGION 1..163: note = pYY-BEM4.53; tr|A0A2D6RD43|A0A2D6RD43_9GAMM polypeptide sequence
MNIENLITENDETLIRRCIELAGESVKNGDKPFGALLAKDGNIIFESSNNAKTKVPYHAEILTLMDAQDKLNTTDLSDYALYSNCEPCPMCSFMIREYKLDKVVFSVHSPYMGGQSRWNILEDDVLTRFKPYFSKPPNVVGGVLESEGKRIFDKVGLWMFGKE

SEQ ID NO: 163 - protein, 204 aa, synthetic construct
  REGION 1..204: note = pYY-BEM4.54; tr|A0A0H3AVL6|A0A0H3AVL6_BRUO2 polypeptide sequence
MHAKGYSQQERRIIPFANRFRFRELCSNKSLHGLRAKFPEQYTKWDPMRKAASITKANSATPMDIALEEAHAAGERGEVPIGAVIVRDGEIIARAGNRTREFNDVTAHAEILTIRQAGEMLGSERLIDCDLYVTLEPCAMCAAAISFARIRRLYYGASDPKGGGIEHGGRFYTQPTCHHAPEIYPGFCEADARKILKDFFREKR

SEQ ID NO: 164 - protein, 165 aa, synthetic construct
  REGION 1..165: note = pYY-BEM4.55; tr|A0A242H531|A0A242H531_9ENTE polypeptide sequence
MFIVKNNIEVIQQQAELDAKFMKQALKLAKDASNNGNEPFGAVLVKNDKVILTGENQIHTESDPTYHAELGIIRDFCTSQKITDLSEYTLYTSCEPCCMCAGAMVWSNLDRMVYGLGHDELAEIAGFNIMIGSEEIFSKSPNRPEVAKGVLKEAAVPVYVDYFQR

SEQ ID NO: 165 - protein, 181 aa, synthetic construct
  REGION 1..181: note = pYY-BEM4.56; tr|A0A2R6XZE2|A0A2R6XZE2_9BACL polypeptide sequence
MSGRISWHEYFMAQAKLIALRATCTRLMVGAVIVRDRRVIAGGYNGSIAGDEHCIDVGCKVRDGHCIRTIHAEQNALMQCAKFGVSTDGAELYVTHFPCLNCTKLLIQAGIRHIYYEVPYRVDPYAIELLEKAGVGTTQITVDLNAYVQVMSKVSTDPALTYVPESKAQKDEYGQSVGKIV

SEQ ID NO: 166 - protein, 173 aa, synthetic construct
  REGION 1..173: note = pYY-BEM4.57; tr|A0A139SHT6|A0A139SHT6_9BACT polypeptide sequence
MSEANASSESLPSRNSPVELIAEAAGKFGRRPTWDEYFMATAVLISTRSSCERLNVGCVIVTAGESHKNRIVAAGYNGHLPGSPHTSRMRDGHEQATVHAEQNAISDAARRGSSVEGCTAYVTHYPCINCAKILASAGIAKICYRLDYHNDPLVKPMLAEAGIEIVQLGEAAS

SEQ ID NO: 167 - protein, 170 aa, synthetic construct
  REGION 1..170: note = pYY-BEM4.58; tr|A0A261DBH2|A0A261DBH2_9RICK polypeptide sequence
MVMKKKLITVKRSTEFNNFFMEEALKQAQFALDKNEIPVGAIIVNRITNKVIAKAHNIVEQTKNPVLHAEIVAINQSCQILSSKNLSDCDMYVTLEPCVMCSGAISFARIGRLFYAANDPKQGAIENGGRFFNSKSCFYRPEIYSGFSAKISENLIKEFFYNVRYQKCNP

SEQ ID NO: 168 - protein, 146 aa, synthetic construct
  REGION 1..146: note = pYY-BEM4.59; tr|A0A2N0XZK6|A0A2N0XZK6_9VIBR polypeptide sequence
MTDNSLHESYMRQAFELSKSALPGCRPNPPVGCVFVKDGEVVSSGFSQPPGNHHAEAGAIAAYTGSYDGLVAYVTLEPCSFQGRTPSCAKALVRVRPEKVYVAILDPDTRNSGAGIKILEDAGIDVEVGLLGEEVASFLNPYLIRN

SEQ ID NO: 169 - protein, 159 aa, synthetic construct
  REGION 1..159: note = pYY-BEM4.60; tr|A0A1V5R0F9|A0A1V5R0F9_9BACT polypeptide sequence
MTKKETTKLHALDDFCMKKALLLAKRAFRADEVPVGALVVDSSNKVIGRGYNQVEKRKSQRAHAEQLAIEQACKKIGDWRLEGCTLYVTLEPCTMCMGLIKLSRIERVVFGAASPLFGYQLDKNRKSQLYKKGVIKIRKGVGKATAAALLKDFFKNKRM

SEQ ID NO: 170 - protein, 167 aa, synthetic construct
  REGION 1..167: note = pYY-BEM4.61; tr|A0A2W0H8Y3|A0A2W0H8Y3_9BACI polypeptide sequence
MKNNGRLDHEYFMTEALQEAKEAGQRGDLPIGAVIVHNGRIIARGSNMRKTAGIKISHAENNAMHNCAPYLMKHASECVIYTTLEPCIMCLTTLVMANIDSIVFAADDKYMNMKPFIDANSYIRDRIHQYKGGVCRGESEALLRKYSPYAAELALNGTHPHHRKGGA

SEQ ID NO: 171 - protein, 165 aa, synthetic construct
  REGION 1..165: note = pYY-BEM4.62; tr|A0A261BDB7|A0A261BDB7_CAERE polypeptide sequence
LYKLYIFRMTTTKANLTQFEQELVDKAVGAMEKAYCKYSGFKVGAALVCEDGEIIIGANHENASYGATICAERSAMVTALTKGHRKFKLLAVATELEAPCSPCGICRQYLIEFGDYKVILGSSTSDQIIETTTYGLLPYAFTPKSLDDHEKEAEERNHQEGEKKH

SEQ ID NO: 172 - protein, 162 aa, synthetic construct
  REGION 1..162: note = pYY-BEM4.63; tr|A0A2E1PHI6|A0A2E1PHI6_9GAMM polypeptide sequence
MKELLIHSWLMLNSNSKLIMERVIELSEINLKNGKIPIAAVIVDKKNYEIISESQNEDSPIGHAELLAITKALKKLNTNRLDSTNLFVTIEPCPMCAYAISKCHINRLYFGSEDEKGGGVINGPRIFESHNLKKIDYVSHCYHEKTTQLMQSFFQLKRNQQL

SEQ ID NO: 173 - protein, 133 aa, synthetic construct
  REGION 1..133: note = pYY-BEM4.64; tr|A0A378LUA7|A0A378LUA7_9GAMM polypeptide sequence
MDTIIKKMISNAHNTLAHSYSPYSKFSVASCICTDKDNFYTGVNVENSAYGLAICAETSAISAMVTAGEKRIKSMVVMAGTNILCSPCGACRQRIYEFSTPDTLIHLCDKNSILRTFKINELLPEAFKFDFNP

SEQ ID NO: 174 - protein, 370 aa, synthetic construct
  REGION 1..370: note = pYY-BEM4.65; tr|A0A139HQ78|A0A139HQ78_9PEZI polypeptide sequence
MADSLKSKPGHARHDTALIHGLSQSDVQKLSESCVDAKSKAYCPYSHFRVGCAVLLANGDVVQGANVENAAYPVGTCAERVALGTAVGAKKGDFRALAVSTDISPPASPCGMCRQFIREFCELNTPILMYDKDGKSVVMTLEQLLPMSFGPDKLLPPGQLENGLMQTQTQSSFVTRAFSTTSSRRQDDTPQVPQSHYDFFPQTFPQGPPPKTSFSPDLKQLRKEFLQLQAKAHPDLAPQDQKRRAEALSMRINEAYKTLQSPLRRAQYLLSQQGIDVEDETAKLDDSSLLMEVMEAREAVEEVEDEEQLNEIRAENNGRIEESVRVLEDAFRDNEFEKAAQEAIRLRYWVNIEESIQGWEKGNGGGILHH

SEQ ID NO: 175 - protein, 165 aa, synthetic construct
  REGION 1..165: note = pYY-BEM4.66; tr|A0A2A9FXV0|A0A2A9FXV0_9VIBR polypeptide sequence
MCNLKENKDMDKYFHFACDATIEGMREGTGGPFGATLTRNGEVVCSVANTVLKDMDISGHAEMVAVREACKKLDTLDLSDCVMYATCEPCPMCVSVMLWAGIKTCYYASTHLDAAKHGFSDQQLRDYLDGSDTSTLNMVHIEDNRDDCAKIWTEFRHLNETKNDG

SEQ ID NO: 176 - protein, 509 aa, synthetic construct
  REGION 1..509: note = pYY-BEM4.67; tr|A0A1A8AG96|A0A1A8AG96_NOTFU polypeptide sequence
MEHSDRWSRAEPGLSTSSRETRDGSTQTDCKLQGHGPRLSKVNLFTLLSLWMELFPQEQDEENGQSQIRRSGLVVVREGKVVGLHCSGADLHAGQAAILQHGASLANCQLFFSRRPCATCLKMIINAGVRQITFWPGDPEISMLTSNQTHSQRTSQSITEASLDATAVEKLKSNSRPQICVLMQPLAPGVLQFVDETSRRSDFMERMMDDDPELDSEKLFNSDRLRHLKDFCRHFLIQTDQRHKDILSQMGLKNFCVEPYFSNLRSNMTELVEVLAAVAAGMPQQHYGFYREESLSLDPHPVDVSQAVARHCIVQARLLSYRTEDPKVGVGAVIWAKGQSACCCGTGRLYLIGCGYNAYPAGSKYAEYPQMDNKQEDRERRKYRYIVHAEQNALTFRTRDIKPDECSMLFVTKCPCDECIPLIRGAGVKHIYTSDQDRDKDKGDISYLRFGSLKGVCKFIWQRSPPVSSASSLHLTNGCVGKHVRQAEQQIYKNKKLCTKGSSGSSDIC

SEQ ID NO: 177 - protein, 148 aa, synthetic construct
  REGION 1..148: note = pYY-BEM4.68; tr|A0A3E2VN88|A0A3E2VN88_9FIRM polypeptide sequence
MEKEITNMDKQKLIQMAVDGLGRSYAPYSHFHVSAALLCADGTVYTGNNIENAAYTPSVCAERCAIFKAVGDGRREFEAIAVCGGPDGVIEDYCPPCGVCRQVMREFCDPSSFRVLVAKTAEDYREYTLEQLLPDGFGPDHLTGSGER

SEQ ID NO: 178 - protein, 221 aa, synthetic construct
  REGION 1..221: note = pYY-BEM4.69; tr|A0A2D5ZRJ2|A0A2D5ZRJ2_9BACT polypeptide sequence
MARPVHLHTGERRTEEGATESRAVAAVATAITRAPRAPPRPATGRERDGPPPRRVFGGGLRVGDPSGYDRGESKPIGGPLTEKRSDWHSYFMRIAGEVATRATCDRKHVGAVIVRNRTILSTGYNGSIRGMPHCDDVGHDMVDGHCIATIHAEANAILQAARNGVMIQDGSIYITASPCWNCFKLVANAGLKRVYYGEFYRDKRSFEVARRLGIDLMHIEV

SEQ ID NO: 179 - protein, 155 aa, synthetic construct
  REGION 1..155: note = pYY-BEM4.70; tr|A0A1B8WPS3|A0A1B8WPS3_9BACI polypeptide sequence
MEGVQLIYQFQWGNLIMTVNKEDLYLIDVARNTIKTLYVDGKHHVGAAVRTKTGKIYSAVHLEANIGRVSVCAEAIALGKAISEGESEFDTIVAVRHPDPTQENQKIEVVSPCGICRELISDYGKGTNVILKNKEGYIKTVISDLLPNKYIREDN

SEQ ID NO: 180 - protein, 156 aa, synthetic construct
  REGION 1..156: note = pYY-BEM4.71; tr|A0A1W5ZQK9|A0A1W5ZQK9_9BACI polypeptide sequence
MNRFMERAVSLAAENVRVGGQPFGAVLVKDDELVAEGVNEMHLNYDVSGHAELLAIRRAQGELQTHDLSGYTMYASGEPCPMCLSAMYFAGIKDVFYCATVEEAAQVGLEKSKNVYDDLQKSKGERSLVMKQMPLEDDQEDPMKLWDERTNHNGTS

SEQ ID NO: 181 - protein, 340 aa, synthetic construct
  REGION 1..340: note = pYY-BEM4.72; tr|A0A378V0W4|A0A378V0W4_MYCFO polypeptide sequence
MVHAQFDPTARQALAATAVEAKTRKDLTWQQIADAAELSPAFVTAAVLGQHALPARSAEAVAALLGLDDDAALLLQTIPIRGSIPGGIPTDPTIYRFYEMLQVYGTTLKALVHEQFGDGIISAINFKLDVRKVADPEGGERAVITLDGKYLPPNPFDRVRYRGGLMDFAQRTIDIARQNVAEGGRPFATVIVKNGEILAESPNLVAQTHDPTAHAEILAIRKACTRIGTEHLIGATIYVLAQPCPMCLGSLYYCSPDEVVFLTTRDAYEPHYVDDRKYFELNMFYDEFAKPWDQRRLPMRYEPRDAAVDVYKLWQERNGGERRVPGAPTSTRPGKNPRGE

SEQ ID NO: 182 - protein, 157 aa, synthetic construct
  REGION 1..157: note = pYY-BEM4.73; tr|I3XF03|I3XF03_RHIFR polypeptide sequence
MKQRCMSPKSAQRFWDNDMHNNKDRPMSENELFVAAREAMAKAHAPYSKFPVGAAIRAEDGQIYTGANIENLSFPEGWCAETTAISHMVMAGQRKIMEVAVIAEKLALCPPCGGCRQRLAEFSGASTRIYLCDETGIKKSLALSDLLPHSFETEILG

SEQ ID NO: 183 - protein, 595 aa, synthetic construct
  REGION 1..595: note = pYY-BEM4.74; tr|F8IEF3|F8IEF3_ALIAT polypeptide sequence
MDAKELETRGWLCMRAVDVIDKKRRGEALAEEELRFLIEGYVAGRIPDYQMSAFLMAVVWRGMTREETLVLTRLLADSGERLDLSGIPGVKVDKHSTGGVGDKATLVVLPLVASIGVPVIKMSGRGLGHTGGTIDKLESIPGFRTDLSVAELVAQVRQVGIALGGQTADLAPADKKLYALRDVTGTVESLPLIASSVMSKKLAGGADAIVLDVKVGDGAFMKSRSDARRLARLMVEIGEAAGRRTVAVLSNMDQPLGCAIGNALEVAEAIRVLSGEGPFDLAEIALALAEEMTVLAGVAATREEARRMLRQSVAEGRALETLRRWIAAQGGDPAVVDDPSRLPQAPVQMPYLPKKAGFVAKLSALAFGLAAMRLGAGRETKEEAIDPSVGIVLHAKVGDRVQTHRPMFTVHARTGEDALRCIQELEAAIQISDDPVEAPPLILARIDRSEALPYADLMDAAREARDRAYVPYSGFAVGAALELADGRMVTGANVENASYGLTNCAERSAVFRAVAEGGPGTKPEIRAVAVIADSPEPVSPCGACRQVLAEFCSPDTPVYLGNLQGDVRETTVGALLPGAFTDAQMANVRRQDKEA

SEQ ID NO: 184 - protein, 153 aa, synthetic construct
  REGION 1..153: note = pYY-BEM4.75; tr|A0A1G3M638|A0A1G3M638_9SPIR polypeptide sequence
MKTTNINALDKWDLRFLQMAEHVAEWSKDPSTKVGAVIVRPDRTIASVGFNGFARGVRDTVERLWNRELKYPLTVHAELNAILSAHEPVRGHSLYVSPLSPCSNCAGVIIQSGIARVVAKCGQVNNPAQWSESFNLALTAFAEAGVSVILVEH

SEQ ID NO: 185 - protein, 177 aa, synthetic construct
  REGION 1..177: note = pYY-BEM4.76; tr|A0A3D9LFR2|A0A3D9LFR2_9MICC polypeptide sequence
MEQNDHGSSGAFSDPFEDDIPLTASLPRITGTGSGIDWQRLESTARAAMTRAYVPYSRFPVGAAALVEDGRVVAGCNIENASLGLTLCAECSLVSNLQMSGGGRIVAFYCVDGNGEVLMPCGRCRQLLYEFHAPGMRLMGPDGELTMDEVLPLAFGPADMTHLSDSAASTDDPGRTR

SEQ ID NO: 186 - protein, 172 aa, synthetic construct
  REGION 1..172: note = pYY-BEM4.77; tr|A0A3B9YGB5|A0A3B9YGB5_9BACT polypeptide sequence
MAKPISKKYRKLIETAKAARKKAYSPYSRYQVGAAVLTESGRIYSGANMENASYGLCMCAERVAIANAVTRGEKVLQAVCVVGKKARPCGACRQVMLEFSTKETELLMVDIDPNARRDTVIRTRVYSMLPNPFDPFESGMLPQHPQNLLRRRKSPQPRRKRRSRPVHREVSR

SEQ ID NO: 187 - protein, 391 aa, synthetic construct
  REGION 1..391: note = pYY-BEM4.78; tr|A0A182F569|A0A182F569_ANOAL polypeptide sequence
MPRPSQFRVSSSQSLSNSQIQASQSSDSVVDITSYVNAVVKALLNLSCTKTIIKRADLVNIALKGNGRLIGRVLQDANIELKEIYGYELIEVEKSKTMILCSTLAAGSMDELNDANRRRYTFLYLILGYIFMKNGSVPETIVWEFLETLGIEEQQEHNYFGDVRKLYDSLFKQAYLTRTKQALEGLNDDVMLISWGVRSKHEVSKKDILAGFCKVMNRDPVDFKAQYIEANEKDDKMNNNINGTVDGRNTVEYSSLDASVKELIEAAIKVRNNAYCPYSNFAVGAALRTVGGDIVTGCNVENGTFGPSVCAERTAVCKAVSEGHREFTAVAVVAFQETEFTAPCGTCRQTLSEFSRKDIPIYLVKPSPVRVMVTSLFQLLPHAFSPSFLNK

SEQ ID NO: 188 - protein, 151 aa, synthetic construct
  REGION 1..151: note = pYY-BEM4.79; tr|A0A264Z0D4|A0A264Z0D4_9BACI polypeptide sequence
MEPKKLIEEAIVASKQAYVQYSNFHVGAALLTKDGKLYHGCNIENASYGLTNCAERTAIFKAVSEGEKEFQAIAVVGDTEGPISPCGACRQVLAEFFSPDTVVILANLKGDHVVTNINELLPGFFSSKDLQKKVKNCFEKNALGSSCLRPI

SEQ ID NO: 189 - protein, 229 aa, synthetic construct
  REGION 1..229: note = pYY-BEM4.80; tr|A0A1L9Q1R3|A0A1L9Q1R3_ASPVE polypeptide sequence
MPLSAEEAALVETATATINSIPLSEDYSVASAAKASDGRVFTGVNVYHFTGGPCAELVVLGVAAAAGAAQLTHIVAVANEQRGILSPCGRCRQVLLDLQPNIQVIVGKEGSEQSVPVAQLLPFSYRQPDQHTPVIFKALTSSGPVVVDFFATWCGPCKAVAPVVGKLSETYTDVRFIQVDVDKARSISQEHDIRAMPTFVLYKDGKLLDKRVVGGNMKELEEQIKAIIA

SEQ ID NO: 190 - protein, 18 aa, synthetic construct
  REGION 1..18: note = synthetic peptide
KRTADGSEFESPKKKRKV

SEQ ID NO: 191 - protein, 16 aa, synthetic construct
  REGION 1..16: note = synthetic peptide
KRPAATKKAGQAKKKK

SEQ ID NO: 192 - protein, 17 aa, synthetic construct
  REGION 1..17: note = synthetic peptide
KKTELQTTNAENKTKKL

SEQ ID NO: 193 - protein, 19 aa, synthetic construct
  REGION 1..19: note = synthetic peptide
KRGINDRNFWRGENGRKTR

SEQ ID NO: 194 - protein, 16 aa, synthetic construct
  REGION 1..16: note = synthetic peptide
RKSGKIAAIVVKRPRK

SEQ ID NO: 195 - protein, 7 aa, synthetic construct
  REGION 1..7: note = synthetic peptide
PKKKRKV

SEQ ID NO: 196 - protein, 30 aa, synthetic construct
  REGION 1..30: note = synthetic polypeptide
MDSLLMNRRKFLYQFKNVRWAKGRRETYLC

SEQ ID NO: 197 - protein, 1368 aa, Streptococcus pyogenes [sequence omitted]

SEQ ID NO: 198 - DNA, 4104 bp, Streptococcus pyogenes
  misc_feature 1..4104: note = wild type spCas9 polynucleotide sequence
  source 1..4104: mol_type = genomic DNA
atggataagaaatactcaataggcttagatatcggcacaaatagcgtcggatgggcggtgatcactgatgattataaggttccgtctaaaaagttcaaggttctgggaaatacagaccgccacagtatcaaaaaaaatcttataggggctcttttatttggcagtggagagacagcggaagcgactcgtctcaaacggacagctcgtagaaggtatacacgtcggaagaatcgtatttgttatctacaggagattttttcaaatgagatggcgaaagtagatgatagtttctttcatcgacttgaagagtcttttttggtggaagaagacaagaagcatgaacgtcatcctatttttggaaatatagtagatgaagttgcttatcatgagaaatatccaactatctatcatctgcgaaaaaaattggcagattctactgataaagcggatttgcgcttaatctatttggccttagcgcatatgattaagtttcgtggtcattttttgattgagggagatttaaatcctgataatagtgatgtggacaaactatttatccagttggtacaaatctacaatcaattatttgaagaaaaccctattaacgcaagtagagtagatgctaaagcgattctttctgcacgattgagtaaatcaagacgattagaaaatctcattgctcagctccccggtgagaagagaaatggcttgtttgggaatctcattgctttgtcattgggattgacccctaattttaaatcaaattttgatttggcagaagatgctaaattacagctttcaaaagatacttacgatgatgatttagataatttattggcgcaaattggagatcaatatgctgatttgtttttggcagctaagaatttatcagatgctattttactttcagatatcctaagagtaaatagtgaaataactaaggctcccctatcagcttcaatgattaagcgctacgatgaacatcatcaagacttgactcttttaaaagctttagttcgacaacaacttccagaaaagtataaagaaatcttttttgatcaatcaaaaaacggatatgcaggttatattgatgggggagctagccaagaagaattttataaatttatcaaaccaattttagaaaaaatggatggtactgaggaattattggtgaaactaaatcgtgaagatttgctgcgcaagcaacggacctttgacaacggctctattccccatcaaattcacttgggtgagctgcatgctattttgagaagacaagaagacttttatccatttttaaaagacaatcgtgagaagattgaaaaaatcttgacttttcgaattccttattatgttggtccattggcgcgtggcaatagtcgttttgcatggatgactcggaagtctgaagaaacaattaccccatggaattttgaagaagttgtcgataaaggtgcttcagctcaatcatttattgaacgcatgacaaactttgataaaaatcttccaaatgaaaaagtactaccaaaacatagtttgctttatgagtattttacggtttataacgaattgacaaaggtcaaatatgttactgagggaatgcgaaaaccagcatttctttcaggtgaacagaagaaagccattgttgatttactcttcaaaacaaatcgaaaagtaaccgttaagcaattaaaagaagattatttcaaaaaaatagaatgttttgatagtgttgaaatttcaggagttgaagatagatttaatgcttcattaggcgcctaccatgatttgctaaaaattattaaagataaagattttttggataatgaagaaaatgaagatatcttagaggatattgttttaacattgaccttatttgaagatagggggatgattgaggaaagacttaaaacatatgctcacctctttgatgataaggtgatgaaacagcttaaacgtcgccgttatactggttggggacgtttgtctcgaaaattgattaatggtattagggataagcaatctggcaaaacaatattagattttttgaaatcagatggttttgccaatcgcaattttatgcagctgatccatgatgatagtttgacatttaaagaagatattcaaaaagcacaggtgtctggacaaggccatagtttacatgaacagattgctaacttagctggcagtcctgctattaaaaaaggtattttacagactgtaaaaattgttgatgaactggtcaaagtaatggggcataagccagaaaatatcgttattgaaatggcacgtgaaaatcagacaactcaaaagggccagaaaaattcgcgagagcgtatgaaacgaatcgaagaaggtatcaaagaattaggaagtcagattcttaaagagcatcctgttgaaaatactcaattgcaaaatgaaaagctctatctctattatctacaaaatggaagagacatgtatgtggaccaagaattagatattaatcgtttaagtgattatgatgtcgatcacattgttccacaaagtttcattaaagacgattcaatagacaataaggtactaacgcgttctgataaaaatcgtggtaaatcggataacgttccaagtgaagaagtagtcaaaaagatgaaaaactattggagacaacttctaaacgccaagttaatcactcaacgtaagtttgataatttaacgaaagctgaacgtggaggtttgagtgaacttgataaagctggttttatcaaacgccaattggttgaaactcgccaaatcactaagcatgtggcacaaattttggatagtcgcatgaatactaaatacgatgaaaatgataaacttattcgagaggttaaagtgattaccttaaaatctaaattagtttctgacttccgaaaagatttccaattctataaagtacgtgagattaacaattaccatcatgcccatgatgcgtatctaaatgccgtcgttggaactgctttgattaagaaatatccaaaacttgaatcggagtttgtctatggtgattataaagtttatgatgttcgtaaaatgattgctaagtctgagcaagaaataggcaaagcaaccgcaaaatatttcttttactctaatatcatgaacttcttcaaaacagaaattacacttgcaaatggagagattcgcaaacgccctctaatcgaaactaatggggaaactggagaaattgtctgggataaagggcgagattttgccacagtgcgcaaagtattgtccatgccccaagtcaatattgtcaagaaaacagaagtacagacaggcggattctccaaggagtcaattttaccaaaaagaaattcggacaagcttattgctcgtaaaaaagactgggatccaaaaaaatatggtggttttgatagtccaacggtagcttattcagtcctagtggttgctaaggtggaaaaagggaaatcgaagaagttaaaatccgttaaagagttactagggatcacaattatggaaagaagttcctttgaaaaaaatccgattgactttttagaagctaaaggatataaggaagttaaaaaagacttaatcattaaactacctaaatatagtctttttgagttagaaaacggtcgtaaacggatgctggctagtgccggagaattacaaaaaggaaatgagctggctctgccaagcaaatatgtgaattttttatatttagctagtcattatgaaaagttgaagggtagtccagaagataacgaacaaaaacaattgtttgtggagcagcataagcattatttagatgagattattgagcaaatcagtgaattttctaagcgtgttattttagcagatgccaatttagataaagttcttagtgcatataacaaacatagagacaaaccaatacgtgaacaagcagaaaatattattcatttatttacgttgacgaatcttggagctcccgctgcttttaaatattttgatacaacaattgatcgtaaacgatatacgtctacaaaagaagttttagatgccactcttatccatcaatccatcactggtctttatgaaacacgcattgatttgagtcagctaggaggtgactga

SEQ ID NO: 199 - protein, 1367 aa, Streptococcus pyogenes
  REGION 1..1367: note = MISC_FEATURE - spCas9 polypeptide sequence
MDKKYSIGLDIGTNSVGWAVITDDYKVPSKKFKVLGNTDRHSIKKNLIGALLFGSGETAEATRLKRTARRRYTRRKNRICYLQEIFSNEMAKVDDSFFHRLEESFLVEEDKKHERHPIFGNIVDEVAYHEKYPTIYHLRKKLADSTDKADLRLIYLALAHMIKFRGHFLIEGDLNPDNSDVDKLFIQLVQIYNQLFEENPINASRVDAKAILSARLSKSRRLENLIAQLPGEKRNGLFGNLIALSLGLTPNFKSNFDLAEDAKLQLSKDTYDDDLDNLLAQIGDQYADLFLAAKNLSDAILLSDILRVNSEITKAPLSASMIKRYDEHHQDLTLLKALVRQQLPEKYKEIFFDQSKNGYAGYIDGGASQEEFYKFIKPILEKMDGTEELLVKLNREDLLRKQRTFDNGSIPHQIHLGELHAILRRQEDFYPFLKDNREKIEKILTFRIPYYVGPLARGNSRFAWMTRKSEETITPWNFEEVVDKGASAQSFIERMTNFDKNLPNEKVLPKHSLLYEYFTVYNELTKVKYVTEGMRKPAFLSGEQKKAIVDLLFKTNRKVTVKQLKEDYFKKIECFDSVEISGVEDRFNASLGAYHDLLKIIKDKDFLDNEENEDILEDIVLTLTLFEDRGMIEERLKTYAHLFDDKVMKQLKRRRYTGWGRLSRKLINGIRDKQSGKTILDFLKSDGFANRNFMQLIHDDSLTFKEDIQKAQVSGQGHSLHEQIANLAGSPAIKKGILQTVKIVDELVKVMGHKPENIVIEMARENQTTQKGQKNSRERMKRIEEGIKELGSQILKEHPVENTQLQNEKLYLYYLQNGRDMYVDQELDINRLSDYDVDHIVPQSFIKDDSIDNKVLTRSDKNRGKSDNVPSEEVVKKMKNYWRQLLNAKLITQRKFDNLTKAERGGLSELDKAGFIKRQLVETRQITKHVAQILDSRMNTKYDENDKLIREVKVITLKSKLVSDFRKDFQFYKVREINNYHHAHDAYLNAVVGTALIKKYPKLESEFVYGDYKVYDVRKMIAKSEQEIGKATAKYFFYSNIMNFFKTEITLANGEIRKRPLIETNGETGEIVWDKGRDFATVRKVLSMPQVNIVKKTEVQTGGFSKESILPKRNSDKLIARKKDWDPKKYGGFDSPTVAYSVLVVAKVEKGKSKKLKSVKELLGITIMERSSFEKNPIDFLEAKGYKEVKKDLIIKLPKYSLFELENGRKRMLASAGELQKGNELALPSKYVNFLYLASHYEKLKGSPEDNEQKQLFVEQHKHYLDEIIEQISEFSKRVILADANLDKVLSAYNKHRDKPIREQAENIIHLFTLTNLGAPAAFKYFDTTIDRKRYTSTKEVLDATLIHQSITGLYETRIDLSQLGGD

SEQ ID NO: 200 - DNA, 4212 bp, synthetic construct
  misc_feature 1..4212: note = wild-type Cas9 polynucleotide sequence
  misc_feature 5..58: note = RuvC domain
  misc_feature 718..764: note = RuvC domain
  misc_feature 772..901: note = HNH domain
  misc_feature 906..1101: note = RuvC domain
  source 1..4212: mol_type = other DNA
atggataaaaagtattctattggtttagacatcggcactaattccgttggatgggctgtcataaccgatgaatacaaagtaccttcaaagaaatttaaggtgttggggaacacagaccgtcattcgattaaaaagaatcttatcggtgccctcctattcgatagtggcgaaacggcagaggcgactcgcctgaaacgaaccgctcggagaaggtatacacgtcgcaagaaccgaatatgttacttacaagaaatttttagcaatgagatggccaaagttgacgattctttctttcaccgtttggaagagtccttccttgtcgaagaggacaagaaacatgaacggcaccccatctttggaaacatagtagatgaggtggcatatcatgaaaagtacccaacgatttatcacctcagaaaaaagctagttgactcaactgataaagcggacctgaggttaatctacttggctcttgcccatatgataaagttccgtgggcactttctcattgagggtgatctaaatccggacaactcggatgtcgacaaactgttcatccagttagtacaaacctataatcagttgtttgaagagaaccctataaatgcaagtggcgtggatgcgaaggctattcttagcgcccgcctctctaaatcccgacggctagaaaacctgatcgcacaattacccggagagaagaaaaatgggttgttcggtaaccttatagcgctctcactaggcctgacaccaaattttaagtcgaacttcgacttagctgaagatgccaaattgcagcttagtaaggacacgtacgatgacgatctcgacaatctactggcacaaattggagatcagtatgcggacttatttttggctgccaaaaaccttagcgatgcaatcctcctatctgacatactgagagttaatactgagattaccaaggcgccgttatccgcttcaatgatcaaaaggtacgatgaacatcaccaagacttgacacttctcaaggccctagtccgtcagcaactgcctgagaaatataaggaaatattctttgatcagtcgaaaaacgggtacgcaggttatattgacggcggagcgagtcaagaggaattctacaagtttatcaaacccatattagagaagatggatgggacggaagagttgcttgtaaaactcaatcgcgaagatctactgcgaaagcagcggactttcgacaacggtagcattccacatcaaatccacttaggcgaattgcatgctatacttagaaggcaggaggatttttatccgttcctcaaagacaatcgtgaaaagattgagaaaatcctaacctttcgcataccttactatgtgggacccctggcccgagggaactctcggttcgcatggatgacaagaaagtccgaagaaacgattactccatggaattttgaggaagttgtcgataaaggtgcgtcagctcaatcgttcatcgagaggatgaccaactttgacaagaatttaccgaacgaaaaagtattgcctaagcacagtttactttacgagtatttcacagtgtacaatgaactcacgaaagttaagtatgtcactgagggcatgcgtaaacccgcctttctaagcggagaacagaagaaagcaatagtagatctgttattcaagaccaaccgcaaagtgacagttaagcaattgaaagaggactactttaagaaaattgaatgcttcgattctgtcgagatctccggggtagaagatcgatttaatgcgtcacttggtacgtatcatgacctcctaaagataattaaagataaggacttcctggataacgaagagaatgaagatatcttagaagatatagtgttgactcttaccctctttgaagatcgggaaatgattgaggaaagactaaaaacatacgctcacctgttcgacgataaggttatgaaacagttaaagaggcgtcgctatacgggctggggacgattgtcgcggaaacttatcaacgggataagagacaagcaaagtggtaaaactattctcgattttctaaagagcgacggcttcgccaataggaactttatgcagctgatccatgatgactctttaaccttcaaagaggatatacaaaaggcacaggtttccggacaaggggactcattgcacgaacatattgcgaatcttgctggttcgccagccatcaaaaagggcatactccagacagtcaaagtagtggatgagctagttaaggtcatgggacgtcacaaaccggaaaacattgtaatcgagatggcacgcgaaaatcaaacgactcagaaggggcaaaaaaacagtcgagagcggatgaagagaatagaagagggtattaaagaactgggcagccagatcttaaaggagcatcctgtggaaaatacccaattgcagaacgagaaactttacctctattacctacaaaatggaagggacatgtatgttgatcaggaactggacataaaccgtttatctgattacgacgtcgatcacattgtaccccaatcctttttgaaggacgattcaatcgacaataaagtgcttacacgctcggataagaaccgagggaaaagtgacaatgttccaagcgaggaagtcgtaaagaaaatgaagaactattggcggcagctcctaaatgcgaaactgataacgcaaagaaagttcgataacttaactaaagctgagaggggtggcttgtctgaacttgacaaggccggatttattaaacgtcagctcgtggaaacccgccaaatcacaaagcatgttgcacagatactagattcccgaatgaatacgaaatacgacgagaacgataagctgattcgggaagtcaaagtaatcactttaaagtcaaaattggtgtcggacttcagaaaggattttcaattctataaagttagggagataaataactaccaccatgcgcacgacgcttatcttaatgccgtcgtagggaccgcactcattaagaaatacccgaagctagaaagtgagtttgtgtatggtgattacaaagtttatgacgtccgtaagatgatcgcgaaaagcgaacaggagataggcaaggctacagccaaatacttcttttattctaacattatgaatttctttaagacggaaatcactctggcaaacggagagatacgcaaacgacctttaattgaaaccaatggggagacaggtgaaatcgtatgggataagggccgggacttcgcgacggtgagaaaagttttgtccatgccccaagtcaacatagtaaagaaaactgaggtgcagaccggagggttttcaaaggaatcgattcttccaaaaaggaatagtgataagctcatcgctcgtaaaaaggactgggacccgaaaaagtacggtggcttcgatagccctacagttgcctattctgtcctagtagtggcaaaagttgagaagggaaaatccaagaaactgaagtcagtcaaagaattattggggataacgattatggagcgctcgtcttttgaaaagaaccccatcgacttccttgaggcgaaaggttacaaggaagtaaaaaaggatctcataattaaactaccaaagtatagtctgtttgagttagaaaatggccgaaaacggatgttggctagcgccggagagcttcaaaaggggaacgaactcgcactaccgtctaaatacgtgaatttcctgtatttagcgtcccattacgagaagttgaaaggttcacctgaagataacgaacagaagcaactttttgttgagcagcacaaacattatctcgacgaaatcatagagcaaatttcggaattcagtaagagagtcatcctagctgatgccaatctggacaaagtattaagcgcatacaacaagcacagggataaacccatacgtgagcaggcggaaaatattatccatttgtttactcttaccaacctcggcgctccagccgcattcaagtattttgacacaacgatagatcgcaaacgatacacttctaccaaggaggtgctagacgcgacactgattcaccaatccatcacgggattatatgaaactcggatagatttgtcacagcttgggggtgacggatcccccaagaagaagaggaaagtctcgagcgactacaaagaccatgacggtgattataaagatcatgacatcgattacaaggatgacgatgacaaggctgcagga

SEQ ID NO: 201 - protein, 1368 aa, synthetic construct
  REGION 1..1368: note = exemplary catalytically active Cas9 nickase (nCas9) polypeptide sequence
MDKKYSIGLAIGTNSVGWAVITDEYKVPSKKFKVLGNTDRHSIKKNLIGALLFDSGETAEATRLKRTARRRYTRRKNRICYLQEIFSNEMAKVDDSFFHRLEESFLVEEDKKHERHPIFGNIVDEVAYHEKYPTIYHLRKKLVDSTDKADLRLIYLALAHMIKFRGHFLIEGDLNPDNSDVDKLFIQLVQTYNQLFEENPINASGVDAKAILSARLSKSRRLENLIAQLPGEKKNGLFGNLIALSLGLTPNFKSNFDLAEDAKLQLSKDTYDDDLDNLLAQIGDQYADLFLAAKNLSDAILLSDILRVNTEITKAPLSASMIKRYDEHHQDLTLLKALVRQQLPEKYKEIFFDQSKNGYAGYIDGGASQEEFYKFIKPILEKMDGTEELLVKLNREDLLRKQRTFDNGSIPHQIHLGELHAILRRQEDFYPFLKDNREKIEKILTFRIPYYVGPLARGNSRFAWMTRKSEETITPWNFEEVVDKGASAQSFIERMTNFDKNLPNEKVLPKHSLLYEYFTVYNELTKVKYVTEGMRKPAFLSGEQKKAIVDLLFKTNRKVTVKQLKEDYFKKIECFDSVEISGVEDRFNASLGTYHDLLKIIKDKDFLDNEENEDILEDIVLTLTLFEDREMIEERLKTYAHLFDDKVMKQLKRRRYTGWGRLSRKLINGIRDKQSGKTILDFLKSDGFANRNFMQLIHDDSLTFKEDIQKAQVSGQGDSLHEHIANLAGSPAIKKGILQTVKVVDELVKVMGRHKPENIVIEMARENQTTQKGQKNSRERMKRIEEGIKELGSQILKEHPVENTQLQNEKLYLYYLQNGRDMYVDQELDINRLSDYDVDHIVPQSFLKDDSIDNKVLTRSDKNRGKSDNVPSEEVVKKMKNYWRQLLNAKLITQRKFDNLTKAERGGLSELDKAGFIKRQLVETRQITKHVAQILDSRMNTKYDENDKLIREVKVITLKSKLVSDFRKDFQFYKVREINNYHHAHDAYLNAVVGTALIKKYPKLESEFVYGDYKVYDVRKMIAKSEQEIGKATAKYFFYSNIMNFFKTEITLANGEIRKRPLIETNGETGEIVWDKGRDFATVRKVLSMPQVNIVKKTEVQTGGFSKESILPKRNSDKLIARKKDWDPKKYGGFDSPTVAYSVLVVAKVEKGKSKKLKSVKELLGITIMERSSFEKNPIDFLEAKGYKEVKKDLIIKLPKYSLFELENGRKRMLASAGELQKGNELALPSKYVNFLYLASHYEKLKGSPEDNEQKQLFVEQHKHYLDEIIEQISEFSKRVILADANLDKVLSAYNKHRDKPIREQAENIIHLFTLTNLGAPAAFKYFDTTIDRKRYTSTKEVLDATLIHQSITGLYETRIDLSQLGGD

SEQ ID NO: 202 - DNA, 4107 bp, Streptococcus pyogenes
  misc_feature 1..4107: note = Cas9 from Streptococcus pyogenes (NCBI Ref. Seq.: NC_002737.2)polynucleotide sequence
  source 1..4107: mol_type = genomic DNA
atggataagaaatactcaataggcttagatatcggcacaaatagcgtcggatgggcggtgatcactgatgaatataaggttccgtctaaaaagttcaaggttctgggaaatacagaccgccacagtatcaaaaaaaatcttataggggctcttttatttgacagtggagagacagcggaagcgactcgtctcaaacggacagctcgtagaaggtatacacgtcggaagaatcgtatttgttatctacaggagattttttcaaatgagatggcgaaagtagatgatagtttctttcatcgacttgaagagtcttttttggtggaagaagacaagaagcatgaacgtcatcctatttttggaaatatagtagatgaagttgcttatcatgagaaatatccaactatctatcatctgcgaaaaaaattggtagattctactgataaagcggatttgcgcttaatctatttggccttagcgcatatgattaagtttcgtggtcattttttgattgagggagatttaaatcctgataatagtgatgtggacaaactatttatccagttggtacaaacctacaatcaattatttgaagaaaaccctattaacgcaagtggagtagatgctaaagcgattctttctgcacgattgagtaaatcaagacgattagaaaatctcattgctcagctccccggtgagaagaaaaatggcttatttgggaatctcattgctttgtcattgggtttgacccctaattttaaatcaaattttgatttggcagaagatgctaaattacagctttcaaaagatacttacgatgatgatttagataatttattggcgcaaattggagatcaatatgctgatttgtttttggcagctaagaatttatcagatgctattttactttcagatatcctaagagtaaatactgaaataactaaggctcccctatcagcttcaatgattaaacgctacgatgaacatcatcaagacttgactcttttaaaagctttagttcgacaacaacttccagaaaagtataaagaaatcttttttgatcaatcaaaaaacggatatgcaggttatattgatgggggagctagccaagaagaattttataaatttatcaaaccaattttagaaaaaatggatggtactgaggaattattggtgaaactaaatcgtgaagatttgctgcgcaagcaacggacctttgacaacggctctattccccatcaaattcacttgggtgagctgcatgctattttgagaagacaagaagacttttatccatttttaaaagacaatcgtgagaagattgaaaaaatcttgacttttcgaattccttattatgttggtccattggcgcgtggcaatagtcgttttgcatggatgactcggaagtctgaagaaacaattaccccatggaattttgaagaagttgtcgataaaggtgcttcagctcaatcatttattgaacgcatgacaaactttgataaaaatcttccaaatgaaaaagtactaccaaaacatagtttgctttatgagtattttacggtttataacgaattgacaaaggtcaaatatgttactgaaggaatgcgaaaaccagcatttctttcaggtgaacagaagaaagccattgttgatttactcttcaaaacaaatcgaaaagtaaccgttaagcaattaaaagaagattatttcaaaaaaatagaatgttttgatagtgttgaaatttcaggagttgaagatagatttaatgcttcattaggtacctaccatgatttgctaaaaattattaaagataaagattttttggataatgaagaaaatgaagatatcttagaggatattgttttaacattgaccttatttgaagatagggagatgattgaggaaagacttaaaacatatgctcacctctttgatgataaggtgatgaaacagcttaaacgtcgccgttatactggttggggacgtttgtctcgaaaattgattaatggtattagggataagcaatctggcaaaacaatattagattttttgaaatcagatggttttgccaatcgcaattttatgcagctgatccatgatgatagtttgacatttaaagaagacattcaaaaagcacaagtgtctggacaaggcgatagtttacatgaacatattgcaaatttagctggtagccctgctattaaaaaaggtattttacagactgtaaaagttgttgatgaattggtcaaagtaatggggcggcataagccagaaaatatcgttattgaaatggcacgtgaaaatcagacaactcaaaagggccagaaaaattcgcgagagcgtatgaaacgaatcgaagaaggtatcaaagaattaggaagtcagattcttaaagagcatcctgttgaaaatactcaattgcaaaatgaaaagctctatctctattatctccaaaatggaagagacatgtatgtggaccaagaattagatattaatcgtttaagtgattatgatgtcgatcacattgttccacaaagtttccttaaagacgattcaatagacaataaggtcttaacgcgttctgataaaaatcgtggtaaatcggataacgttccaagtgaagaagtagtcaaaaagatgaaaaactattggagacaacttctaaacgccaagttaatcactcaacgtaagtttgataatttaacgaaagctgaacgtggaggtttgagtgaacttgataaagctggttttatcaaacgccaattggttgaaactcgccaaatcactaagcatgtggcacaaattttggatagtcgcatgaatactaaatacgatgaaaatgataaacttattcgagaggttaaagtgattaccttaaaatctaaattagtttctgacttccgaaaagatttccaattctataaagtacgtgagattaacaattaccatcatgcccatgatgcgtatctaaatgccgtcgttggaactgctttgattaagaaatatccaaaacttgaatcggagtttgtctatggtgattataaagtttatgatgttcgtaaaatgattgctaagtctgagcaagaaataggcaaagcaaccgcaaaatatttcttttactctaatatcatgaacttcttcaaaacagaaattacacttgcaaatggagagattcgcaaacgccctctaatcgaaactaatggggaaactggagaaattgtctgggataaagggcgagattttgccacagtgcgcaaagtattgtccatgccccaagtcaatattgtcaagaaaacagaagtacagacaggcggattctccaaggagtcaattttaccaaaaagaaattcggacaagcttattgctcgtaaaaaagactgggatccaaaaaaatatggtggttttgatagtccaacggtagcttattcagtcctagtggttgctaaggtggaaaaagggaaatcgaagaagttaaaatccgttaaagagttactagggatcacaattatggaaagaagttcctttgaaaaaaatccgattgactttttagaagctaaaggatataaggaagttaaaaaagacttaatcattaaactacctaaatatagtctttttgagttagaaaacggtcgtaaacggatgctggctagtgccggagaattacaaaaaggaaatgagctggctctgccaagcaaatatgtgaattttttatatttagctagtcattatgaaaagttgaagggtagtccagaagataacgaacaaaaacaattgtttgtggagcagcataagcattatttagatgagattattgagcaaatcagtgaattttctaagcgtgttattttagcagatgccaatttagataaagttcttagtgcatataacaaacatagagacaaaccaatacgtgaacaagcagaaaatattattcatttatttacgttgacgaatcttggagctcccgctgcttttaaatattttgatacaacaattgatcgtaaacgatatacgtctacaaaagaagttttagatgccactcttatccatcaatccatcactggtctttatgaaacacgcattgatttgagtcagctaggaggtgactga

SEQ ID NO: 203 - protein, 1368 aa, synthetic construct
  REGION 1..1368: note = catalytically inactive Cas9 (dCas9)polypeptide sequence
  REGION 5..58: note = MISC_FEATURE - RuvC domain
  REGION 718..764: note = MISC_FEATURE - RuvC domain
  REGION 773..902: note = MISC_FEATURE - HNH domain
  REGION 907..1102: note = MISC_FEATURE - RuvC domain
MDKKYSIGLAIGTNSVGWAVITDEYKVPSKKFKVLGNTDRHSIKKNLIGALLFDSGETAEATRLKRTARRRYTRRKNRICYLQEIFSNEMAKVDDSFFHRLEESFLVEEDKKHERHPIFGNIVDEVAYHEKYPTIYHLRKKLVDSTDKADLRLIYLALAHMIKFRGHFLIEGDLNPDNSDVDKLFIQLVQTYNQLFEENPINASGVDAKAILSARLSKSRRLENLIAQLPGEKKNGLFGNLIALSLGLTPNFKSNFDLAEDAKLQLSKDTYDDDLDNLLAQIGDQYADLFLAAKNLSDAILLSDILRVNTEITKAPLSASMIKRYDEHHQDLTLLKALVRQQLPEKYKEIFFDQSKNGYAGYIDGGASQEEFYKFIKPILEKMDGTEELLVKLNREDLLRKQRTFDNGSIPHQIHLGELHAILRRQEDFYPFLKDNREKIEKILTFRIPYYVGPLARGNSRFAWMTRKSEETITPWNFEEVVDKGASAQSFIERMTNFDKNLPNEKVLPKHSLLYEYFTVYNELTKVKYVTEGMRKPAFLSGEQKKAIVDLLFKTNRKVTVKQLKEDYFKKIECFDSVEISGVEDRFNASLGTYHDLLKIIKDKDFLDNEENEDILEDIVLTLTLFEDREMIEERLKTYAHLFDDKVMKQLKRRRYTGWGRLSRKLINGIRDKQSGKTILDFLKSDGFANRNFMQLIHDDSLTFKEDIQKAQVSGQGDSLHEHIANLAGSPAIKKGILQTVKVVDELVKVMGRHKPENIVIEMARENQTTQKGQKNSRERMKRIEEGIKELGSQILKEHPVENTQLQNEKLYLYYLQNGRDMYVDQELDINRLSDYDVDAIVPQSFLKDDSIDNKVLTRSDKNRGKSDNVPSEEVVKKMKNYWRQLLNAKLITQRKFDNLTKAERGGLSELDKAGFIKRQLVETRQITKHVAQILDSRMNTKYDENDKLIREVKVITLKSKLVSDFRKDFQFYKVREINNYHHAHDAYLNAVVGTALIKKYPKLESEFVYGDYKVYDVRKMIAKSEQEIGKATAKYFFYSNIMNFFKTEITLANGEIRKRPLIETNGETGEIVWDKGRDFATVRKVLSMPQVNIVKKTEVQTGGFSKESILPKRNSDKLIARKKDWDPKKYGGFDSPTVAYSVLVVAKVEKGKSKKLKSVKELLGITIMERSSFEKNPIDFLEAKGYKEVKKDLIIKLPKYSLFELENGRKRMLASAGELQKGNELALPSKYVNFLYLASHYEKLKGSPEDNEQKQLFVEQHKHYLDEIIEQISEFSKRVILADANLDKVLSAYNKHRDKPIREQAENIIHLFTLTNLGAPAAFKYFDTTIDRKRYTSTKEVLDATLIHQSITGLYETRIDLSQLGGD

SEQ ID NO: 204 - protein, 345 aa, Sulfolobus islandicus
  REGION 1..345: note = MISC_FEATURE - tr|F0NN87|F0NN87_SULIHCRISPR-associatedCasx protein OS =Sulfolobus islandicus (strain HVE10/4) GN = SiH_0402 PE=4; SV = 1);CasX polypeptide sequence
MEVPLYNIFGDNYIIQVATEAENSTIYNNKVEIDDEELRNVLNLAYKIAKNNEDAAAERRGKAKKKKGEEGETTTSNIILPLSGNDKNPWTETLKCYNFPTTVALSEVFKNFSQVKECEEVSAPSFVKPEFYEFGRSPGMVERTRRVKLEVEPHYLIIAAAGWVLTRLGKAKVSEGDYVGVNVFTPTRGILYSLIQNVNGIVPGIKPETAFGLWIARKVVSSVTNPNVSVVRIYTISDAVGQNPTTINGGFSIDLTKLLEKRYLLSERLEAIARNALSISSNMRERYIVLANYIYEYLTGSKRLEDLLYFANRDLIMNLNSDDGKVRDLKLISAYVNGELIRGEG

SEQ ID NO: 205 - protein, 345 aa, Sulfolobus islandicus
  REGION 1..345: note = MISC_FEATURE - tr|F0NH53|F0NH53_SULIR CRISPR associated protein, Casx OS =Sulfolobus islandicus (strain REY15A) GN=SiRe_0771 PE=4 SV=1);CasX polypeptide sequence
MEVPLYNIFGDNYIIQVATEAENSTIYNNKVEIDDEELRNVLNLAYKIAKNNEDAAAERRGKAKKKKGEEGETTTSNIILPLSGNDKNPWTETLKCYNFPTTVALSEVFKNFSQVKECEEVSAPSFVKPEFYKFGRSPGMVERTRRVKLEVEPHYLIMAAAGWVLTRLGKAKVSEGDYVGVNVFTPTRGILYSLIQNVNGIVPGIKPETAFGLWIARKVVSSVTNPNVSVVSIYTISDAVGQNPTTINGGFSIDLTKLLEKRDLLSERLEAIARNALSISSNMRERYIVLANYIYEYLTGSKRLEDLLYFANRDLIMNLNSDDGKVRDLKLISAYVNGELIRGEG

SEQ ID NO: 206 - protein, 987 aa, unidentified
  REGION 1..987: note = MISC_FEATURE - CasX polypeptide sequence
MEKRINKIRKKLSADNATKPVSRSGPMKTLLVRVMTDDLKKRLEKRRKKPEVMPQVISNNAANNLRMLLDDYTKMKEAILQVYWQEFKDDHVGLMCKFAQPASKKIDQNKLKPEMDEKGNLTTAGFACSQCGQPLFVYKLEQVSEKGKAYTNYFGRCNVAEHEKLILLAQLKPVKDSDEAVTYSLGKFGQRALDFYSIHVTKESTHPVKPLAQIAGNRYASGPVGKALSDACMGTIASFLSKYQDIIIEHQKVVKGNQKRLESLRELAGKENLEYPSVTLPPQPHTKEGVDFAYNEVIARVRMWVNLNLWQKLKLSRDDAKPLLRLKGFPSFPVVERRENEVDWWNTINEVKKLIDAKRDMGRVFWSGVTAEKRNTILEGYNYLPNENDHKKREGSLENPKKPAKRQFGDLLLYLEKKYAGDWGKVFDEAWERIDKKIAGLTSHIEREEARNAEDAQSKAVLTDWLRAKASFVLERLKEMDEKEFYACEIQLQKWYGDLRGNPFAVEAENRVVDISGFSIGSDGHSIQYRNLLAWKYLENGKREFYLLMNYGKKGRIRFTDGTDIKKSGKWQGLLYGGGKAKVIDLTFDPDDEQLIILPLAFGTRQGREFIWNDLLSLETGLIKLANGRVIEKTIYNKKIGRDEPALFVALTFERREVVDPSNIKPVNLIGVARGENIPAVIALTDPEGCPLPEFKDSSGGPTDILRIGEGYKEKQRAIQAAKEVEQRRAGGYSRKFASKSRNLADDMVRNSARDLFYHAVTHDAVLVFANLSRGFGRQGKRTFMTERQYTKMEDWLTAKLAYEGLTSKTYLSKTLAQYTSKTCSNCGFTITYADMDVMLVRLKKTSDGWATTLNNKELKAEYQITYYNRYKRQTVEKELSAELDRLSEESGNNDISKWTKGRRDEALFLLKKRFSHRPVQEQFVCLDCGHEVHAAEQAALNIARSWLFLNSNSTEFKSYKSGKQPFVGAWQAFYKRRLKEVWKPNA

SEQ ID NO: 207 - protein, 1210 aa, unidentified
  REGION 1..1210: note = MISC_FEATURE - APG80656.1 CRISPR-associated protein CasY [uncultured Parcubacteria group bacterium]; CasY polypeptide sequence
MSKRHPRISGVKGYRLHAQRLEYTGKSGAMRTIKYPLYSSPSGGRTVPREIVSAINDDYVGLYGLSNFDDLYNAEKRNEEKVYSVLDFWYDCVQYGAVFSYTAPGLLKNVAEVRGGSYELTKTLKGSHLYDELQIDKVIKFLNKKEISRANGSLDKLKKDIIDCFKAEYRERHKDQCNKLADDIKNAKKDAGASLGERQKKLFRDFFGISEQSENDKPSFTNPLNLTCCLLPFDTVNNNRNRGEVLFNKLKEYAQKLDKNEGSLEMWEYIGIGNSGTAFSNFLGEGFLGRLRENKITELKKAMMDITDAWRGQEQEEELEKRLRILAALTIKLREPKFDNHWGGYRSDINGKLSSWLQNYINQTVKIKEDLKGHKKDLKKAKEMINRFGESDTKEEAVVSSLLESIEKIVPDDSADDEKPDIPAIAIYRRFLSDGRLTLNRFVQREDVQEALIKERLEAEKKKKPKKRKKKSDAEDEKETIDFKELFPHLAKPLKLVPNFYGDSKRELYKKYKNAAIYTDALWKAVEKIYKSAFSSSLKNSFFDTDFDKDFFIKRLQKIFSVYRRFNTDKWKPIVKNSFAPYCDIVSLAENEVLYKPKQSRSRKSAAIDKNRVRLPSTENIAKAGIALARELSVAGFDWKDLLKKEEHEEYIDLIELHKTALALLLAVTETQLDISALDFVENGTVKDFMKTRDGNLVLEGRFLEMFSQSIVFSELRGLAGLMSRKEFITRSAIQTMNGKQAELLYIPHEFQSAKITTPKEMSRAFLDLAPAEFATSLEPESLSEKSLLKLKQMRYYPHYFGYELTRTGQGIDGGVAENALRLEKSPVKKREIKCKQYKTLGRGQNKIVLYVRSSYYQTQFLEWFLHRPKNVQTDVAVSGSFLIDEKKVKTRWNYDALTVALEPVSGSERVFVSQPFTIFPEKSAEEEGQRYLGIDIGEYGIAYTALEITGDSAKILDQNFISDPQLKTLREEVKGLKLDQRRGTFAMPSTKIARIRESLVHSLRNRIHHLALKHKAKIVYELEVSRFEEGKQKIKKVYATLKKADVYSEIDADKNLQTTVWGKLAVASEISASYTSQFCGACKKLWRAEMQVDETITTQELIGTVRVIKGGTLIDAIKDFMRPPIFDENDTPFPKYRDFCDKHHISKKMRGNSCLFICPFCRANADADIQASQTIALLRYVKEEKKVEDYFERFRKLKNIKVLGQMKKI

SEQ ID NO: 208 - protein, 1082 aa, Neisseria meningitidis
  REGION 1..1082: note = MISC_FEATURE - NCBI Reference: WP_002235162.1; type II CRISPR RNA-guided endonuclease Cas9; Nme1Cas9 polypeptide sequence
MAAFKPNPINYILGLDIGIASVGWAMVEIDEDENPICLIDLGVRVFERAEVPKTGDSLAMARRLARSVRRLTRRRAHRLLRARRLLKREGVLQAADFDENGLIKSLPNTPWQLRAAALDRKLTPLEWSAVLLHLIKHRGYLSQRKNEGETADKELGALLKGVADNAHALQTGDFRTPAELALNKFEKESGHIRNQRGDYSHTFSRKDLQAELILLFEKQKEFGNPHVSGGLKEGIETLLMTQRPALSGDAVQKMLGHCTFEPAEPKAAKNTYTAERFIWLTKLNNLRILEQGSERPLTDTERATLMDEPYRKSKLTYAQARKLLGLEDTAFFKGLRYGKDNAEASTLMEMKAYHAISRALEKEGLKDKKSPLNLSPELQDEIGTAFSLFKTDEDITGRLKDRIQPEILEALLKHISFDKFVQISLKALRRIVPLMEQGKRYDEACAEIYGDHYGKKNTEEKIYLPPIPADEIRNPVVLRALSQARKVINGVVRRYGSPARIHIETAREVGKSFKDRKEIEKRQEENRKDREKAAAKFREYFPNFVGEPKSKDILKLRLYEQQHGKCLYSGKEINLGRLNEKGYVEIDHALPFSRTWDDSFNNKVLVLGSENQNKGNQTPYEYFNGKDNSREWQEFKARVETSRFPRSKKQRILLQKFDEDGFKERNLNDTRYVNRFLCQFVADRMRLTGKGKKRVFASNGQITNLLRGFWGLRKVRAENDRHHALDAVVVACSTVAMQQKITRFVRYKEMNAFDGKTIDKETGEVLHQKTHFPQPWEFFAQEVMIRVFGKPDGKPEFEEADTPEKLRTLLAEKLSSRPEAVHEYVTPLFVSRAPNRKMSGQGHMETVKSAKRLDEGVSVLRVPLTQLKLKDLEKMVNREREPKLYEALKARLEAHKDDPAKAFAEPFYKYDKAGNRTQQVKAVRVEQVQKTGVWVRNHNGIADNATMVRVDVFEKGDKYYLVPIYSWQVAKGILPDRAVVQGKDEEDWQLIDDSFNFKFSLHPNDLVEVITKKARMFGYFASCHRGTGNINIRIHDLDHKIGKNGILEGIGVKTALSFQKYQIDELGKEIRPCRLKKRPPVR

SEQ ID NO: 209 - protein, 1082 aa, Neisseria meningitidis
  REGION 1..1082: note = MISC_FEATURE - NCBI Reference: WP_002230835; type II CRISPR RNA-guided endonuclease Cas9; Nme2Cas9 polypeptide sequence
MAAFKPNPINYILGLDIGIASVGWAMVEIDEEENPIRLIDLGVRVFERAEVPKTGDSLAMARRLARSVRRLTRRRAHRLLRARRLLKREGVLQAADFDENGLIKSLPNTPWQLRAAALDRKLTPLEWSAVLLHLIKHRGYLSQRKNEGETADKELGALLKGVANNAHALQTGDFRTPAELALNKFEKESGHIRNQRGDYSHTFSRKDLQAELILLFEKQKEFGNPHVSGGLKEGIETLLMTQRPALSGDAVQKMLGHCTFEPAEPKAAKNTYTAERFIWLTKLNNLRILEQGSERPLTDTERATLMDEPYRKSKLTYAQARKLLGLEDTAFFKGLRYGKDNAEASTLMEMKAYHAISRALEKEGLKDKKSPLNLSSELQDEIGTAFSLFKTDEDITGRLKDRVQPEILEALLKHISFDKFVQISLKALRRIVPLMEQGKRYDEACAEIYGDHYGKKNTEEKIYLPPIPADEIRNPVVLRALSQARKVINGVVRRYGSPARIHIETAREVGKSFKDRKEIEKRQEENRKDREKAAAKFREYFPNFVGEPKSKDILKLRLYEQQHGKCLYSGKEINLVRLNEKGYVEIDHALPFSRTWDDSFNNKVLVLGSENQNKGNQTPYEYFNGKDNSREWQEFKARVETSRFPRSKKQRILLQKFDEDGFKECNLNDTRYVNRFLCQFVADHILLTGKGKRRVFASNGQITNLLRGFWGLRKVRAENDRHHALDAVVVACSTVAMQQKITRFVRYKEMNAFDGKTIDKETGKVLHQKTHFPQPWEFFAQEVMIRVFGKPDGKPEFEEADTPEKLRTLLAEKLSSRPEAVHEYVTPLFVSRAPNRKMSGAHKDTLRSAKRFVKHNEKISVKRVWLTEIKLADLENMVNYKNGREIELYEALKARLEAYGGNAKQAFDPKDNPFYKKGGQLVKAVRVEKTQESGVLLNKKNAYTIADNGDMVRVDVFCKVDKKGKNQYFIVPIYAWQVAENILPDIDCKGYRIDDSYTFCFSLHKYDLIAFQKDEKSKVEFAYYINCDSSNGRFYLAWHDKGSKEQQFRISTQNLVLIQKYQVNELGKEIRPCRLKKRPPVR

SEQ ID NO: 210 - protein, 1300 aa, Francisella tularensis
  REGION 1..1300: note = MISC_FEATURE - wild type Cpf1 polypeptide sequence
  source 1..1300: note = subspecies novicida
MSIYQEFVNKYSLSKTLRFELIPQGKTLENIKARGLILDDEKRAKDYKKAKQIIDKYHQFFIEEILSSVCISEDLLQNYSDVYFKLKKSDDDNLQKDFKSAKDTIKKQISEYIKDSEKFKNLFNQNLIDAKKGQESDLILWLKQSKDNGIELFKANSDITDIDEALEIIKSFKGWTTYFKGFHENRKNVYSSNDIPTSIIYRIVDDNLPKFLENKAKYESLKDKAPEAINYEQIKKDLAEELTFDIDYKTSEVNQRVFSLDEVFEIANFNNYLNQSGITKFNTIIGGKFVNGENTKRKGINEYINLYSQQINDKTLKKYKMSVLFKQILSDTESKSFVIDKLEDDSDVVTTMQSFYEQIAAFKTVEEKSIKETLSLLFDDLKAQKLDLSKIYFKNDKSLTDLSQQVFDDYSVIGTAVLEYITQQIAPKNLDNPSKKEQELIAKKTEKAKYLSLETIKLALEEFNKHRDIDKQCRFEEILANFAAIPMIFDEIAQNKDNLAQISIKYQNQGKKDLLQASAEDDVKAIKDLLDQTNNLLHKLKIFHISQSEDKANILDKDEHFYLVFEECYFELANIVPLYNKIRNYITQKPYSDEKFKLNFENSTLANGWDKNKEPDNTAILFIKDDKYYLGVMNKKNNKIFDDKAIKENKGEGYKKIVYKLLPGANKMLPKVFFSAKSIKFYNPSEDILRIRNHSTHTKNGSPQKGYEKFEFNIEDCRKFIDFYKQSISKHPEWKDFGFRFSDTQRYNSIDEFYREVENQGYKLTFENISESYIDSVVNQGKLYLFQIYNKDFSAYSKGRPNLHTLYWKALFDERNLQDVVYKLNGEAELFYRKQSIPKKITHPAKEAIANKNKDNPKKESVFEYDLIKDKRFTEDKFFFHCPITINFKSSGANKFNDEINLLLKEKANDVHILSIDRGERHLAYYTLVDGKGNIIKQDTFNIIGNDRMKTNYHDKLAAIEKDRDSARKDWKKINNIKEMKEGYLSQVVHEIAKLVIEYNAIVVFEDLNFGFKRGRFKVEKQVYQKLEKMLIEKLNYLVFKDNEFDKTGGVLRAYQLTAPFETFKKMGKQTGIIYYVPAGFTSKICPVTGFVNQLYPKYESVSKSQEFFSKFDKICYNLDKGYFEFSFDYKNFGDKAAKGKWTIASFGSRLINFRNSDKNHNWDTREVYPTKELEKLLKDYSIEYGHGECIKAAICGESDKKFFAKLTSVLNTILQMRNSKTGTELDYLISPVADVNGNFFDSRQAPKNMPQDADANGAYHIGLKGLMLLGRIKNNQEGKKLNLVIKNEEYFEFVQNRNN

SEQ ID NO: 211 - protein, 1300 aa, Francisella tularensis
  REGION 1..1300: note = MISC_FEATURE - Cpf1 D917A polypeptide sequence
  source 1..1300: note = subspecies novicida
MSIYQEFVNKYSLSKTLRFELIPQGKTLENIKARGLILDDEKRAKDYKKAKQIIDKYHQFFIEEILSSVCISEDLLQNYSDVYFKLKKSDDDNLQKDFKSAKDTIKKQISEYIKDSEKFKNLFNQNLIDAKKGQESDLILWLKQSKDNGIELFKANSDITDIDEALEIIKSFKGWTTYFKGFHENRKNVYSSNDIPTSIIYRIVDDNLPKFLENKAKYESLKDKAPEAINYEQIKKDLAEELTFDIDYKTSEVNQRVFSLDEVFEIANFNNYLNQSGITKFNTIIGGKFVNGENTKRKGINEYINLYSQQINDKTLKKYKMSVLFKQILSDTESKSFVIDKLEDDSDVVTTMQSFYEQIAAFKTVEEKSIKETLSLLFDDLKAQKLDLSKIYFKNDKSLTDLSQQVFDDYSVIGTAVLEYITQQIAPKNLDNPSKKEQELIAKKTEKAKYLSLETIKLALEEFNKHRDIDKQCRFEEILANFAAIPMIFDEIAQNKDNLAQISIKYQNQGKKDLLQASAEDDVKAIKDLLDQTNNLLHKLKIFHISQSEDKANILDKDEHFYLVFEECYFELANIVPLYNKIRNYITQKPYSDEKFKLNFENSTLANGWDKNKEPDNTAILFIKDDKYYLGVMNKKNNKIFDDKAIKENKGEGYKKIVYKLLPGANKMLPKVFFSAKSIKFYNPSEDILRIRNHSTHTKNGSPQKGYEKFEFNIEDCRKFIDFYKQSISKHPEWKDFGFRFSDTQRYNSIDEFYREVENQGYKLTFENISESYIDSVVNQGKLYLFQIYNKDFSAYSKGRPNLHTLYWKALFDERNLQDVVYKLNGEAELFYRKQSIPKKITHPAKEAIANKNKDNPKKESVFEYDLIKDKRFTEDKFFFHCPITINFKSSGANKFNDEINLLLKEKANDVHILSIARGERHLAYYTLVDGKGNIIKQDTFNIIGNDRMKTNYHDKLAAIEKDRDSARKDWKKINNIKEMKEGYLSQVVHEIAKLVIEYNAIVVFEDLNFGFKRGRFKVEKQVYQKLEKMLIEKLNYLVFKDNEFDKTGGVLRAYQLTAPFETFKKMGKQTGIIYYVPAGFTSKICPVTGFVNQLYPKYESVSKSQEFFSKFDKICYNLDKGYFEFSFDYKNFGDKAAKGKWTIASFGSRLINFRNSDKNHNWDTREVYPTKELEKLLKDYSIEYGHGECIKAAICGESDKKFFAKLTSVLNTILQMRNSKTGTELDYLISPVADVNGNFFDSRQAPKNMPQDADANGAYHIGLKGLMLLGRIKNNQEGKKLNLVIKNEEYFEFVQNRNN

SEQ ID NO: 212 - protein, 1300 aa, Francisella tularensis
  REGION 1..1300: note = MISC_FEATURE - Cpf1 E1006A polypeptide sequence
  source 1..1300: note = subspecies novicida
MSIYQEFVNKYSLSKTLRFELIPQGKTLENIKARGLILDDEKRAKDYKKAKQIIDKYHQFFIEEILSSVCISEDLLQNYSDVYFKLKKSDDDNLQKDFKSAKDTIKKQISEYIKDSEKFKNLFNQNLIDAKKGQESDLILWLKQSKDNGIELFKANSDITDIDEALEIIKSFKGWTTYFKGFHENRKNVYSSNDIPTSIIYRIVDDNLPKFLENKAKYESLKDKAPEAINYEQIKKDLAEELTFDIDYKTSEVNQRVFSLDEVFEIANFNNYLNQSGITKFNTIIGGKFVNGENTKRKGINEYINLYSQQINDKTLKKYKMSVLFKQILSDTESKSFVIDKLEDDSDVVTTMQSFYEQIAAFKTVEEKSIKETLSLLFDDLKAQKLDLSKIYFKNDKSLTDLSQQVFDDYSVIGTAVLEYITQQIAPKNLDNPSKKEQELIAKKTEKAKYLSLETIKLALEEFNKHRDIDKQCRFEEILANFAAIPMIFDEIAQNKDNLAQISIKYQNQGKKDLLQASAEDDVKAIKDLLDQTNNLLHKLKIFHISQSEDKANILDKDEHFYLVFEECYFELANIVPLYNKIRNYITQKPYSDEKFKLNFENSTLANGWDKNKEPDNTAILFIKDDKYYLGVMNKKNNKIFDDKAIKENKGEGYKKIVYKLLPGANKMLPKVFFSAKSIKFYNPSEDILRIRNHSTHTKNGSPQKGYEKFEFNIEDCRKFIDFYKQSISKHPEWKDFGFRFSDTQRYNSIDEFYREVENQGYKLTFENISESYIDSVVNQGKLYLFQIYNKDFSAYSKGRPNLHTLYWKALFDERNLQDVVYKLNGEAELFYRKQSIPKKITHPAKEAIANKNKDNPKKESVFEYDLIKDKRFTEDKFFFHCPITINFKSSGANKFNDEINLLLKEKANDVHILSIDRGERHLAYYTLVDGKGNIIKQDTFNIIGNDRMKTNYHDKLAAIEKDRDSARKDWKKINNIKEMKEGYLSQVVHEIAKLVIEYNAIVVFADLNFGFKRGRFKVEKQVYQKLEKMLIEKLNYLVFKDNEFDKTGGVLRAYQLTAPFETFKKMGKQTGIIYYVPAGFTSKICPVTGFVNQLYPKYESVSKSQEFFSKFDKICYNLDKGYFEFSFDYKNFGDKAAKGKWTIASFGSRLINFRNSDKNHNWDTREVYPTKELEKLLKDYSIEYGHGECIKAAICGESDKKFFAKLTSVLNTILQMRNSKTGTELDYLISPVADVNGNFFDSRQAPKNMPQDADANGAYHIGLKGLMLLGRIKNNQEGKKLNLVIKNEEYFEFVQNRNN

SEQ ID NO: 213 - protein, 1300 aa, Francisella tularensis
  REGION 1..1300: note = MISC_FEATURE - Cpf1 D1255A polypeptide sequence
  source 1..1300: note = subspecies novicida
MSIYQEFVNKYSLSKTLRFELIPQGKTLENIKARGLILDDEKRAKDYKKAKQIIDKYHQFFIEEILSSVCISEDLLQNYSDVYFKLKKSDDDNLQKDFKSAKDTIKKQISEYIKDSEKFKNLFNQNLIDAKKGQESDLILWLKQSKDNGIELFKANSDITDIDEALEIIKSFKGWTTYFKGFHENRKNVYSSNDIPTSIIYRIVDDNLPKFLENKAKYESLKDKAPEAINYEQIKKDLAEELTFDIDYKTSEVNQRVFSLDEVFEIANFNNYLNQSGITKFNTIIGGKFVNGENTKRKGINEYINLYSQQINDKTLKKYKMSVLFKQILSDTESKSFVIDKLEDDSDVVTTMQSFYEQIAAFKTVEEKSIKETLSLLFDDLKAQKLDLSKIYFKNDKSLTDLSQQVFDDYSVIGTAVLEYITQQIAPKNLDNPSKKEQELIAKKTEKAKYLSLETIKLALEEFNKHRDIDKQCRFEEILANFAAIPMIFDEIAQNKDNLAQISIKYQNQGKKDLLQASAEDDVKAIKDLLDQTNNLLHKLKIFHISQSEDKANILDKDEHFYLVFEECYFELANIVPLYNKIRNYITQKPYSDEKFKLNFENSTLANGWDKNKEPDNTAILFIKDDKYYLGVMNKKNNKIFDDKAIKENKGEGYKKIVYKLLPGANKMLPKVFFSAKSIKFYNPSEDILRIRNHSTHTKNGSPQKGYEKFEFNIEDCRKFIDFYKQSISKHPEWKDFGFRFSDTQRYNSIDEFYREVENQGYKLTFENISESYIDSVVNQGKLYLFQIYNKDFSAYSKGRPNLHTLYWKALFDERNLQDVVYKLNGEAELFYRKQSIPKKITHPAKEAIANKNKDNPKKESVFEYDLIKDKRFTEDKFFFHCPITINFKSSGANKFNDEINLLLKEKANDVHILSIDRGERHLAYYTLVDGKGNIIKQDTFNIIGNDRMKTNYHDKLAAIEKDRDSARKDWKKINNIKEMKEGYLSQVVHEIAKLVIEYNAIVVFEDLNFGFKRGRFKVEKQVYQKLEKMLIEKLNYLVFKDNEFDKTGGVLRAYQLTAPFETFKKMGKQTGIIYYVPAGFTSKICPVTGFVNQLYPKYESVSKSQEFFSKFDKICYNLDKGYFEFSFDYKNFGDKAAKGKWTIASFGSRLINFRNSDKNHNWDTREVYPTKELEKLLKDYSIEYGHGECIKAAICGESDKKFFAKLTSVLNTILQMRNSKTGTELDYLISPVADVNGNFFDSRQAPKNMPQDAAANGAYHIGLKGLMLLGRIKNNQEGKKLNLVIKNEEYFEFVQNRNN

SEQ ID NO: 214 - protein, 1300 aa, Francisella tularensis
  REGION 1..1300: note = MISC_FEATURE - Cpf1 D917A/E1006A polypeptide sequence
  source 1..1300: note = subspecies novicida
MSIYQEFVNKYSLSKTLRFELIPQGKTLENIKARGLILDDEKRAKDYKKAKQIIDKYHQFFIEEILSSVCISEDLLQNYSDVYFKLKKSDDDNLQKDFKSAKDTIKKQISEYIKDSEKFKNLFNQNLIDAKKGQESDLILWLKQSKDNGIELFKANSDITDIDEALEIIKSFKGWTTYFKGFHENRKNVYSSNDIPTSIIYRIVDDNLPKFLENKAKYESLKDKAPEAINYEQIKKDLAEELTFDIDYKTSEVNQRVFSLDEVFEIANFNNYLNQSGITKFNTIIGGKFVNGENTKRKGINEYINLYSQQINDKTLKKYKMSVLFKQILSDTESKSFVIDKLEDDSDVVTTMQSFYEQIAAFKTVEEKSIKETLSLLFDDLKAQKLDLSKIYFKNDKSLTDLSQQVFDDYSVIGTAVLEYITQQIAPKNLDNPSKKEQELIAKKTEKAKYLSLETIKLALEEFNKHRDIDKQCRFEEILANFAAIPMIFDEIAQNKDNLAQISIKYQNQGKKDLLQASAEDDVKAIKDLLDQTNNLLHKLKIFHISQSEDKANILDKDEHFYLVFEECYFELANIVPLYNKIRNYITQKPYSDEKFKLNFENSTLANGWDKNKEPDNTAILFIKDDKYYLGVMNKKNNKIFDDKAIKENKGEGYKKIVYKLLPGANKMLPKVFFSAKSIKFYNPSEDILRIRNHSTHTKNGSPQKGYEKFEFNIEDCRKFIDFYKQSISKHPEWKDFGFRFSDTQRYNSIDEFYREVENQGYKLTFENISESYIDSVVNQGKLYLFQIYNKDFSAYSKGRPNLHTLYWKALFDERNLQDVVYKLNGEAELFYRKQSIPKKITHPAKEAIANKNKDNPKKESVFEYDLIKDKRFTEDKFFFHCPITINFKSSGANKFNDEINLLLKEKANDVHILSIARGERHLAYYTLVDGKGNIIKQDTFNIIGNDRMKTNYHDKLAAIEKDRDSARKDWKKINNIKEMKEGYLSQVVHEIAKLVIEYNAIVVFADLNFGFKRGRFKVEKQVYQKLEKMLIEKLNYLVFKDNEFDKTGGVLRAYQLTAPFETFKKMGKQTGIIYYVPAGFTSKICPVTGFVNQLYPKYESVSKSQEFFSKFDKICYNLDKGYFEFSFDYKNFGDKAAKGKWTIASFGSRLINFRNSDKNHNWDTREVYPTKELEKLLKDYSIEYGHGECIKAAICGESDKKFFAKLTSVLNTILQMRNSKTGTELDYLISPVADVNGNFFDSRQAPKNMPQDADANGAYHIGLKGLMLLGRIKNNQEGKKLNLVIKNEEYFEFVQNRNN

SEQ ID NO: 215 - protein, 1300 aa, Francisella tularensis
  REGION 1..1300: note = MISC_FEATURE - Cpf1 D917A/D1255A polypeptide sequence
  source 1..1300: note = subspecies novicida
MSIYQEFVNKYSLSKTLRFELIPQGKTLENIKARGLILDDEKRAKDYKKAKQIIDKYHQFFIEEILSSVCISEDLLQNYSDVYFKLKKSDDDNLQKDFKSAKDTIKKQISEYIKDSEKFKNLFNQNLIDAKKGQESDLILWLKQSKDNGIELFKANSDITDIDEALEIIKSFKGWTTYFKGFHENRKNVYSSNDIPTSIIYRIVDDNLPKFLENKAKYESLKDKAPEAINYEQIKKDLAEELTFDIDYKTSEVNQRVFSLDEVFEIANFNNYLNQSGITKFNTIIGGKFVNGENTKRKGINEYINLYSQQINDKTLKKYKMSVLFKQILSDTESKSFVIDKLEDDSDVVTTMQSFYEQIAAFKTVEEKSIKETLSLLFDDLKAQKLDLSKIYFKNDKSLTDLSQQVFDDYSVIGTAVLEYITQQIAPKNLDNPSKKEQELIAKKTEKAKYLSLETIKLALEEFNKHRDIDKQCRFEEILANFAAIPMIFDEIAQNKDNLAQISIKYQNQGKKDLLQASAEDDVKAIKDLLDQTNNLLHKLKIFHISQSEDKANILDKDEHFYLVFEECYFELANIVPLYNKIRNYITQKPYSDEKFKLNFENSTLANGWDKNKEPDNTAILFIKDDKYYLGVMNKKNNKIFDDKAIKENKGEGYKKIVYKLLPGANKMLPKVFFSAKSIKFYNPSEDILRIRNHSTHTKNGSPQKGYEKFEFNIEDCRKFIDFYKQSISKHPEWKDFGFRFSDTQRYNSIDEFYREVENQGYKLTFENISESYIDSVVNQGKLYLFQIYNKDFSAYSKGRPNLHTLYWKALFDERNLQDVVYKLNGEAELFYRKQSIPKKITHPAKEAIANKNKDNPKKESVFEYDLIKDKRFTEDKFFFHCPITINFKSSGANKFNDEINLLLKEKANDVHILSIARGERHLAYYTLVDGKGNIIKQDTFNIIGNDRMKTNYHDKLAAIEKDRDSARKDWKKINNIKEMKEGYLSQVVHEIAKLVIEYNAIVVFEDLNFGFKRGRFKVEKQVYQKLEKMLIEKLNYLVFKDNEFDKTGGVLRAYQLTAPFETFKKMGKQTGIIYYVPAGFTSKICPVTGFVNQLYPKYESVSKSQEFFSKFDKICYNLDKGYFEFSFDYKNFGDKAAKGKWTIASFGSRLINFRNSDKNHNWDTREVYPTKELEKLLKDYSIEYGHGECIKAAICGESDKKFFAKLTSVLNTILQMRNSKTGTELDYLISPVADVNGNFFDSRQAPKNMPQDAAANGAYHIGLKGLMLLGRIKNNQEGKKLNLVIKNEEYFEFVQNRNN

SEQ ID NO: 216 - protein, 1300 aa, Francisella tularensis
  REGION 1..1300: note = MISC_FEATURE - Cpf1 E1006A/D1255A polypeptide sequence
  source 1..1300: note = subspecies novicida
MSIYQEFVNKYSLSKTLRFELIPQGKTLENIKARGLILDDEKRAKDYKKAKQIIDKYHQFFIEEILSSVCISEDLLQNYSDVYFKLKKSDDDNLQKDFKSAKDTIKKQISEYIKDSEKFKNLFNQNLIDAKKGQESDLILWLKQSKDNGIELFKANSDITDIDEALEIIKSFKGWTTYFKGFHENRKNVYSSNDIPTSIIYRIVDDNLPKFLENKAKYESLKDKAPEAINYEQIKKDLAEELTFDIDYKTSEVNQRVFSLDEVFEIANFNNYLNQSGITKFNTIIGGKFVNGENTKRKGINEYINLYSQQINDKTLKKYKMSVLFKQILSDTESKSFVIDKLEDDSDVVTTMQSFYEQIAAFKTVEEKSIKETLSLLFDDLKAQKLDLSKIYFKNDKSLTDLSQQVFDDYSVIGTAVLEYITQQIAPKNLDNPSKKEQELIAKKTEKAKYLSLETIKLALEEFNKHRDIDKQCRFEEILANFAAIPMIFDEIAQNKDNLAQISIKYQNQGKKDLLQASAEDDVKAIKDLLDQTNNLLHKLKIFHISQSEDKANILDKDEHFYLVFEECYFELANIVPLYNKIRNYITQKPYSDEKFKLNFENSTLANGWDKNKEPDNTAILFIKDDKYYLGVMNKKNNKIFDDKAIKENKGEGYKKIVYKLLPGANKMLPKVFFSAKSIKFYNPSEDILRIRNHSTHTKNGSPQKGYEKFEFNIEDCRKFIDFYKQSISKHPEWKDFGFRFSDTQRYNSIDEFYREVENQGYKLTFENISESYIDSVVNQGKLYLFQIYNKDFSAYSKGRPNLHTLYWKALFDERNLQDVVYKLNGEAELFYRKQSIPKKITHPAKEAIANKNKDNPKKESVFEYDLIKDKRFTEDKFFFHCPITINFKSSGANKFNDEINLLLKEKANDVHILSIDRGERHLAYYTLVDGKGNIIKQDTFNIIGNDRMKTNYHDKLAAIEKDRDSARKDWKKINNIKEMKEGYLSQVVHEIAKLVIEYNAIVVFADLNFGFKRGRFKVEKQVYQKLEKMLIEKLNYLVFKDNEFDKTGGVLRAYQLTAPFETFKKMGKQTGIIYYVPAGFTSKICPVTGFVNQLYPKYESVSKSQEFFSKFDKICYNLDKGYFEFSFDYKNFGDKAAKGKWTIASFGSRLINFRNSDKNHNWDTREVYPTKELEKLLKDYSIEYGHGECIKAAICGESDKKFFAKLTSVLNTILQMRNSKTGTELDYLISPVADVNGNFFDSRQAPKNMPQDAAANGAYHIGLKGLMLLGRIKNNQEGKKLNLVIKNEEYFEFVQNRNN

SEQ ID NO: 217 - protein, 1300 aa, Francisella tularensis
  REGION 1..1300: note = MISC_FEATURE - Cpf1 D917A/E1006A/D1255A polypeptide sequence
  source 1..1300: note = subspecies novicida
MSIYQEFVNKYSLSKTLRFELIPQGKTLENIKARGLILDDEKRAKDYKKAKQIIDKYHQFFIEEILSSVCISEDLLQNYSDVYFKLKKSDDDNLQKDFKSAKDTIKKQISEYIKDSEKFKNLFNQNLIDAKKGQESDLILWLKQSKDNGIELFKANSDITDIDEALEIIKSFKGWTTYFKGFHENRKNVYSSNDIPTSIIYRIVDDNLPKFLENKAKYESLKDKAPEAINYEQIKKDLAEELTFDIDYKTSEVNQRVFSLDEVFEIANFNNYLNQSGITKFNTIIGGKFVNGENTKRKGINEYINLYSQQINDKTLKKYKMSVLFKQILSDTESKSFVIDKLEDDSDVVTTMQSFYEQIAAFKTVEEKSIKETLSLLFDDLKAQKLDLSKIYFKNDKSLTDLSQQVFDDYSVIGTAVLEYITQQIAPKNLDNPSKKEQELIAKKTEKAKYLSLETIKLALEEFNKHRDIDKQCRFEEILANFAAIPMIFDEIAQNKDNLAQISIKYQNQGKKDLLQASAEDDVKAIKDLLDQTNNLLHKLKIFHISQSEDKANILDKDEHFYLVFEECYFELANIVPLYNKIRNYITQKPYSDEKFKLNFENSTLANGWDKNKEPDNTAILFIKDDKYYLGVMNKKNNKIFDDKAIKENKGEGYKKIVYKLLPGANKMLPKVFFSAKSIKFYNPSEDILRIRNHSTHTKNGSPQKGYEKFEFNIEDCRKFIDFYKQSISKHPEWKDFGFRFSDTQRYNSIDEFYREVENQGYKLTFENISESYIDSVVNQGKLYLFQIYNKDFSAYSKGRPNLHTLYWKALFDERNLQDVVYKLNGEAELFYRKQSIPKKITHPAKEAIANKNKDNPKKESVFEYDLIKDKRFTEDKFFFHCPITINFKSSGANKFNDEINLLLKEKANDVHILSIARGERHLAYYTLVDGKGNIIKQDTFNIIGNDRMKTNYHDKLAAIEKDRDSARKDWKKINNIKEMKEGYLSQVVHEIAKLVIEYNAIVVFADLNFGFKRGRFKVEKQVYQKLEKMLIEKLNYLVFKDNEFDKTGGVLRAYQLTAPFETFKKMGKQTGIIYYVPAGFTSKICPVTGFVNQLYPKYESVSKSQEFFSKFDKICYNLDKGYFEFSFDYKNFGDKAAKGKWTIASFGSRLINFRNSDKNHNWDTREVYPTKELEKLLKDYSIEYGHGECIKAAICGESDKKFFAKLTSVLNTILQMRNSKTGTELDYLISPVADVNGNFFDSRQAPKNMPQDAAANGAYHIGLKGLMLLGRIKNNQEGKKLNLVIKNEEYFEFVQNRNN

SEQ ID NO: 218 - protein, 1052 aa, Staphylococcus aureus
  REGION 1..1052: note = MISC_FEATURE - Exemplary SaCas9 polypeptide sequence
KRNYILGLDIGITSVGYGIIDYETRDVIDAGVRLFKEANVENNEGRRSKRGARRLKRRRRHRIQRVKKLLFDYNLLTDHSELSGINPYEARVKGLSQKLSEEEFSAALLHLAKRRGVHNVNEVEEDTGNELSTKEQISRNSKALEEKYVAELQLERLKKDGEVRGSINRFKTSDYVKEAKQLLKVQKAYHQLDQSFIDTYIDLLETRRTYYEGPGEGSPFGWKDIKEWYEMLMGHCTYFPEELRSVKYAYNADLYNALNDLNNLVITRDENEKLEYYEKFQIIENVFKQKKKPTLKQIAKEILVNEEDIKGYRVTSTGKPEFTNLKVYHDIKDITARKEIIENAELLDQIAKILTIYQSSEDIQEELTNLNSELTQEEIEQISNLKGYTGTHNLSLKAINLILDELWHTNDNQIAIFNRLKLVPKKVDLSQQKEIPTTLVDDFILSPVVKRSFIQSIKVINAIIKKYGLPNDIIIELAREKNSKDAQKMINEMQKRNRQTNERIEEIIRTTGKENAKYLIEKIKLHDMQEGKCLYSLEAIPLEDLLNNPFNYEVDHIIPRSVSFDNSFNNKVLVKQEENSKKGNRTPFQYLSSSDSKISYETFKKHILNLAKGKGRISKTKKEYLLEERDINRFSVQKDFINRNLVDTRYATRGLMNLLRSYFRVNNLDVKVKSINGGFTSFLRRKWKFKKERNKGYKHHAEDALIIANADFIFKEWKKLDKAKKVMENQMFEEKQAESMPEIETEQEYKEIFITPHQIKHIKDFKDYKYSHRVDKKPNRELINDTLYSTRKDDKGNTLIVNNLNGLYDKDNDKLKKLINKSPEKLLMYHHDPQTYQKLKLIMEQYGDEKNPLYKYYEETGNYLTKYSKKDNGPVIKKIKYYGNKLNAHLDITDDYPNSRNKVVKLSLKPYRFDVYLDNGVYKFVTVKNLDVIKKENYYEVNSKCYEEAKKLKKISNQAEFIASFYNNDLIKINGELYRVIGVNNDLLNRIEVNMIDITYREYLENMNDKRPPRIIKTIASKTQSIKKYSTDILGNLYEVKSKKHPQIIKKG

SEQ ID NO: 219 - protein, 1052 aa, Staphylococcus aureus
  REGION 1..1052: note = MISC_FEATURE - SaCas9n polypeptide sequence
KRNYILGLDIGITSVGYGIIDYETRDVIDAGVRLFKEANVENNEGRRSKRGARRLKRRRRHRIQRVKKLLFDYNLLTDHSELSGINPYEARVKGLSQKLSEEEFSAALLHLAKRRGVHNVNEVEEDTGNELSTKEQISRNSKALEEKYVAELQLERLKKDGEVRGSINRFKTSDYVKEAKQLLKVQKAYHQLDQSFIDTYIDLLETRRTYYEGPGEGSPFGWKDIKEWYEMLMGHCTYFPEELRSVKYAYNADLYNALNDLNNLVITRDENEKLEYYEKFQIIENVFKQKKKPTLKQIAKEILVNEEDIKGYRVTSTGKPEFTNLKVYHDIKDITARKEIIENAELLDQIAKILTIYQSSEDIQEELTNLNSELTQEEIEQISNLKGYTGTHNLSLKAINLILDELWHTNDNQIAIFNRLKLVPKKVDLSQQKEIPTTLVDDFILSPVVKRSFIQSIKVINAIIKKYGLPNDIIIELAREKNSKDAQKMINEMQKRNRQTNERIEEIIRTTGKENAKYLIEKIKLHDMQEGKCLYSLEAIPLEDLLNNPFNYEVDHIIPRSVSFDNSFNNKVLVKQEEASKKGNRTPFQYLSSSDSKISYETFKKHILNLAKGKGRISKTKKEYLLEERDINRFSVQKDFINRNLVDTRYATRGLMNLLRSYFRVNNLDVKVKSINGGFTSFLRRKWKFKKERNKGYKHHAEDALIIANADFIFKEWKKLDKAKKVMENQMFEEKQAESMPEIETEQEYKEIFITPHQIKHIKDFKDYKYSHRVDKKPNRELINDTLYSTRKDDKGNTLIVNNLNGLYDKDNDKLKKLINKSPEKLLMYHHDPQTYQKLKLIMEQYGDEKNPLYKYYEETGNYLTKYSKKDNGPVIKKIKYYGNKLNAHLDITDDYPNSRNKVVKLSLKPYRFDVYLDNGVYKFVTVKNLDVIKKENYYEVNSKCYEEAKKLKKISNQAEFIASFYNNDLIKINGELYRVIGVNNDLLNRIEVNMIDITYREYLENMNDKRPPRIIKTIASKTQSIKKYSTDILGNLYEVKSKKHPQIIKKG

SEQ ID NO: 220 - protein, 1052 aa, Staphylococcus aureus
  REGION 1..1052: note = MISC_FEATURE - SaKKH Cas9 polypeptide sequence
KRNYILGLDIGITSVGYGIIDYETRDVIDAGVRLFKEANVENNEGRRSKRGARRLKRRRRHRIQRVKKLLFDYNLLTDHSELSGINPYEARVKGLSQKLSEEEFSAALLHLAKRRGVHNVNEVEEDTGNELSTKEQISRNSKALEEKYVAELQLERLKKDGEVRGSINRFKTSDYVKEAKQLLKVQKAYHQLDQSFIDTYIDLLETRRTYYEGPGEGSPFGWKDIKEWYEMLMGHCTYFPEELRSVKYAYNADLYNALNDLNNLVITRDENEKLEYYEKFQIIENVFKQKKKPTLKQIAKEILVNEEDIKGYRVTSTGKPEFTNLKVYHDIKDITARKEIIENAELLDQIAKILTIYQSSEDIQEELTNLNSELTQEEIEQISNLKGYTGTHNLSLKAINLILDELWHTNDNQIAIFNRLKLVPKKVDLSQQKEIPTTLVDDFILSPVVKRSFIQSIKVINAIIKKYGLPNDIIIELAREKNSKDAQKMINEMQKRNRQTNERIEEIIRTTGKENAKYLIEKIKLHDMQEGKCLYSLEAIPLEDLLNNPFNYEVDHIIPRSVSFDNSFNNKVLVKQEEASKKGNRTPFQYLSSSDSKISYETFKKHILNLAKGKGRISKTKKEYLLEERDINRFSVQKDFINRNLVDTRYATRGLMNLLRSYFRVNNLDVKVKSINGGFTSFLRRKWKFKKERNKGYKHHAEDALIIANADFIFKEWKKLDKAKKVMENQMFEEKQAESMPEIETEQEYKEIFITPHQIKHIKDFKDYKYSHRVDKKPNRKLINDTLYSTRKDDKGNTLIVNNLNGLYDKDNDKLKKLINKSPEKLLMYHHDPQTYQKLKLIMEQYGDEKNPLYKYYEETGNYLTKYSKKDNGPVIKKIKYYGNKLNAHLDITDDYPNSRNKVVKLSLKPYRFDVYLDNGVYKFVTVKNLDVIKKENYYEVNSKCYEEAKKLKKISNQAEFIASFYKNDLIKINGELYRVIGVNNDLLNRIEVNMIDITYREYLENMNDKRPPHIIKTIASKTQSIKKYSTDILGNLYEVKSKKHPQIIKKG

SEQ ID NO: 221 - protein, 707 aa, synthetic construct
  REGION 1..707: note = Casphi-1 polypeptide sequence
MADTPTLFTQFLRHHLPGQRFRKDILKQAGRILANKGEDATIAFLRGKSEESPPDFQPPVKCPIIACSRPLTEWPIYQASVAIQGYVYGQSLAEFEASDPGCSKDGLLGWFDKTGVCTDYFSVQGLNLIFQNARKRYIGVQTKVTNRNEKRHKKLKRINAKRIAEGLPELTSDEPESALDETGHLIDPPGLNTNIYCYQQVSPKPLALSEVNQLPTAYAGYSTSGDDPIQPMVTKDRLSISKGQPGYIPEHQRALLSQKKHRRMRGYGLKARALLVIVRIQDDWAVIDLRSLLRNAYWRRIVQTKEPSTITKLLKLVTGDPVLDATRMVATFTYKPGIVQVRSAKCLKNKQGSKLFSERYLNETVSVTSIDLGSNNLVAVATYRLVNGNTPELLQRFTLPSHLVKDFERYKQAHDTLEDSIQKTAVASLPQGQQTEIRMWSMYGFREAQERVCQELGLADGSIPWNVMTATSTILTDLFLARGGDPKKCMFTSEPKKKKNSKQVLYKIRDRAWAKMYRTLLSKETREAWNKALWGLKRGSPDYARLSKRKEELARRCVNYTISTAEKRAQCGRTIVALEDLNIGFFHGRGKQEPGWVGLFTRKKENRWLMQALHKAFLELAHHRGYHVIEVNPAYTSQTCPVCRHCDPDNRDQHNREAFHCIGCGFRGNADLDVATHNIAMVAITGESLKRARGSVASKTPQPLAAE

SEQ ID NO: 222 - protein, 757 aa, synthetic construct
  REGION 1..757: note = Casphi-2 polypeptide sequence
MPKPAVESEFSKVLKKHFPGERFRSSYMKRGGKILAAQGEEAVVAYLQGKSEEEPPNFQPPAKCHVVTKSRDFAEWPIMKASEAIQRYIYALSTTERAACKPGKSSESHAAWFAATGVSNHGYSHVQGLNLIFDHTLGRYDGVLKKVQLRNEKARARLESINASRADEGLPEIKAEEEEVATNETGHLLQPPGINPSFYVYQTISPQAYRPRDEIVLPPEYAGYVRDPNAPIPLGVVRNRCDIQKGCPGYIPEWQREAGTAISPKTGKAVTVPGLSPKKNKRMRRYWRSEKEKAQDALLVTVRIGTDWVVIDVRGLLRNARWRTIAPKDISLNALLDLFTGDPVIDVRRNIVTFTYTLDACGTYARKWTLKGKQTKATLDKLTATQTVALVAIDLGQTNPISAGISRVTQENGALQCEPLDRFTLPDDLLKDISAYRIAWDRNEEELRARSVEALPEAQQAEVRALDGVSKETARTQLCADFGLDPKRLPWDKMSSNTTFISEALLSNSVSRDQVFFTPAPKKGAKKKAPVEVMRKDRTWARAYKPRLSVEAQKLKNEALWALKRTSPEYLKLSRRKEELCRRSINYVIEKTRRRTQCQIVIPVIEDLNVRFFHGSGKRLPGWDNFFTAKKENRWFIQGLHKAFSDLRTHRSFYVFEVRPERTSITCPKCGHCEVGNRDGEAFQCLSCGKTCNADLDVATHNLTQVALTGKTMPKREEPRDAQGTAPARKTKKASKSKAPPAEREDQTPAQEPSQTS

SEQ ID NO: 223 - protein, 766 aa, synthetic construct
  REGION 1..766: note = Casphi-3 polypeptide sequence
MEKEITELTKIRREFPNKKFSSTDMKKAGKLLKAEGPDAVRDFLNSCQEIIGDFKPPVKTNIVSISRPFEEWPVSMVGRAIQEYYFSLTKEELESVHPGTSSEDHKSFFNITGLSNYNYTSVQGLNLIFKNAKAIYDGTLVKANNKNKKLEKKFNEINHKRSLEGLPIITPDFEEPFDENGHLNNPPGINRNIYGYQGCAAKVFVPSKHKMVSLPKEYEGYNRDPNLSLAGFRNRLEIPEGEPGHVPWFQRMDIPEGQIGHVNKIQRFNFVHGKNSGKVKFSDKTGRVKRYHHSKYKDATKPYKFLEESKKVSALDSILAIITIGDDWVVFDIRGLYRNVFYRELAQKGLTAVQLLDLFTGDPVIDPKKGVVTFSYKEGVVPVFSQKIVPRFKSRDTLEKLTSQGPVALLSVDLGQNEPVAARVCSLKNINDKITLDNSCRISFLDDYKKQIKDYRDSLDELEIKIRLEAINSLETNQQVEIRDLDVFSADRAKANTVDMFDIDPNLISWDSMSDARVSTQISDLYLKNGGDESRVYFEINNKRIKRSDYNISQLVRPKLSDSTRKNLNDSIWKLKRTSEEYLKLSKRKLELSRAVVNYTIRQSKLLSGINDIVIILEDLDVKKKFNGRGIRDIGWDNFFSSRKENRWFIPAFHKAFSELSSNRGLCVIEVNPAWTSATCPDCGFCSKENRDGINFTCRKCGVSYHADIDVATLNIARVAVLGKPMSGPADRERLGDTKKPRVARSRKTMKRKDISNSTVEAMVTA

SEQ ID NO: 224 - protein, 765 aa, synthetic construct
  REGION 1..765: note = Casphi-4 polypeptide sequence
MYSLEMADLKSEPSLLAKLLRDRFPGKYWLPKYWKLAEKKRLTGGEEAACEYMADKQLDSPPPNFRPPARCVILAKSRPFEDWPVHRVASKAQSFVIGLSEQGFAALRAAPPSTADARRDWLRSHGASEDDLMALEAQLLETIMGNAISLHGGVLKKIDNANVKAAKRLSGRNEARLNKGLQELPPEQEGSAYGADGLLVNPPGLNLNIYCRKSCCPKPVKNTARFVGHYPGYLRDSDSILISGTMDRLTIIEGMPGHIPAWQREQGLVKPGGRRRRLSGSESNMRQKVDPSTGPRRSTRSGTVNRSNQRTGRNGDPLLVEIRMKEDWVLLDARGLLRNLRWRESKRGLSCDHEDLSLSGLLALFSGDPVIDPVRNEVVFLYGEGIIPVRSTKPVGTRQSKKLLERQASMGPLTLISCDLGQTNLIAGRASAISLTHGSLGVRSSVRIELDPEIIKSFERLRKDADRLETEILTAAKETLSDEQRGEVNSHEKDSPQTAKASLCRELGLHPPSLPWGQMGPSTTFIADMLISHGRDDDAFLSHGEFPTLEKRKKFDKRFCLESRPLLSSETRKALNESLWEVKRTSSEYARLSQRKKEMARRAVNFVVEISRRKTGLSNVIVNIEDLNVRIFHGGGKQAPGWDGFFRPKSENRWFIQAIHKAFSDLAAHHGIPVIESDPQRTSMTCPECGHCDSKNRNGVRFLCKGCGASMDADFDAACRNLERVALTGKPMPKPSTSCERLLSATTGKVCSDHSLSHDAIEKAS

SEQ ID NO: 225 - protein, 793 aa, synthetic construct
  REGION 1..793: note = Casphi-5 polypeptide sequence
MSSLPTPLELLKQKHADLFKGLQFSSKDNKMAGKVLKKDGEEAALAFLSERGVSRGELPNFRPPAKTLVVAQSRPFEEFPIYRVSEAIQLYVYSLSVKELETVPSGSSTKKEHQRFFQDSSVPDFGYTSVQGLNKIFGLARGIYLGVITRGENQLQKAKSKHEALNKKRRASGEAETEFDPTPYEYMTPERKLAKPPGVNHSIMCYVDISVDEFDFRNPDGIVLPSEYAGYCREINTAIEKGTVDRLGHLKGGPGYIPGHQRKESTTEGPKINFRKGRIRRSYTALYAKRDSRRVRQGKLALPSYRHHMMRLNSNAESAILAVIFFGKDWVVFDLRGLLRNVRWRNLFVDGSTPSTLLGMFGDPVIDPKRGVVAFCYKEQIVPVVSKSITKMVKAPELLNKLYLKSEDPLVLVAIDLGQTNPVGVGVYRVMNASLDYEVVTRFALESELLREIESYRQRTNAFEAQIRAETFDAMTSEEQEEITRVRAFSASKAKENVCHRFGMPVDAVDWATMGSNTIHIAKWVMRHGDPSLVEVLEYRKDNEIKLDKNGVPKKVKLTDKRIANLTSIRLRFSQETSKHYNDTMWELRRKHPVYQKLSKSKADFSRRVVNSIIRRVNHLVPRARIVFIIEDLKNLGKVFHGSGKRELGWDSYFEPKSENRWFIQVLHKAFSETGKHKGYYIIECWPNWTSCTCPKCSCCDSENRHGEVFRCLACGYTCNTDFGTAPDNLVKIATTGKGLPGPKKRCKGSSKGKNPKIARSSETGVSVTESGAPKVKKSSPTQTSQSSSQSAP

SEQ ID NO: 226 - protein, 441 aa, synthetic construct
  REGION 1..441: note = Casphi-6 polypeptide sequence
MNKIEKEKTPLAKLMNENFAGLRFPFAIIKQAGKKLLKEGELKTIEYMTGKGSIEPLPNFKPPVKCLIVAKRRDLKYFPICKASCEIQSYVYSLNYKDFMDYFSTPMTSQKQHEEFFKKSGLNIEYQNVAGLNLIFNNVKNTYNGVILKVKNRNEKLKKKAIKNNYEFEEIKTFNDDGCLINKPGINNVIYCFQSISPKILKNITHLPKEYNDYDCSVDRNIIQKYVSRLDIPESQPGHVPEWQRKLPEFNNTNNPRRRRKWYSNGRNISKGYSVDQVNQAKIEDSLLAQIKIGEDWIILDIRGLLRDLNRRELISYKNKLTIKDVLGFFSDYPIIDIKKNLVTFCYKEGVIQVVSQKSIGNKKSKQLLEKLIENKPIALVSIDLGQTNPVSVKISKLNKINNKISIESFTYRFLNEEILKEIEKYRKDYDKLELKLINEA

SEQ ID NO: 227 - protein, 772 aa, synthetic construct
  REGION 1..772: note = Casphi-7 polypeptide sequence
MSNTAVSTREHMSNKTTPPSPLSLLLRAHFPGLKFESQDYKIAGKKLRDGGPEAVISYLTGKGQAKLKDVKPPAKAFVIAQSRPFIEWDLVRVSRQIQEKIFGIPATKGRPKQDGLSETAFNEAVASLEVDGKSKLNEETRAAFYEVLGLDAPSLHAQAQNALIKSAISIREGVLKKVENRNEKNLSKTKRRKEAGEEATFVEEKAHDERGYLIHPPGVNQTIPGYQAVVIKSCPSDFIGLPSGCLAKESAEALTDYLPHDRMTIPKGQPGYVPEWQHPLLNRRKNRRRRDWYSASLNKPKATCSKRSGTPNRKNSRTDQIQSGRFKGAIPVLMRFQDEWVIIDIRGLLRNARYRKLLKEKSTIPDLLSLFTGDPSIDMRQGVCTFIYKAGQACSAKMVKTKNAPEILSELTKSGPVVLVSIDLGQTNPIAAKVSRVTQLSDGQLSHETLLRELLSNDSSDGKEIARYRVASDRLRDKLANLAVERLSPEHKSEILRAKNDTPALCKARVCAALGLNPEMIAWDKMTPYTEFLATAYLEKGGDRKVATLKPKNRPEMLRRDIKFKGTEGVRIEVSPEAAEAYREAQWDLQRTSPEYLRLSTWKQELTKRILNQLRHKAAKSSQCEVVVMAFEDLNIKMMHGNGKWADGGWDAFFIKKRENRWFMQAFHKSLTELGAHKGVPTIEVTPHRTSITCTKCGHCDKANRDGERFACQKCGFVAHADLEIATDNIERVALTGKPMPKPESERSGDAKKSVGARKAAFKPEEDAEAAE

SEQ ID NO: 228 - protein, 717 aa, synthetic construct
  REGION 1..717: note = Casphi-8 polypeptide sequence
MIKPTVSQFLTPGFKLIRNHSRTAGLKLKNEGEEACKKFVRENEIPKDECPNFQGGPAIANIIAKSREFTEWEIYQSSLAIQEVIFTLPKDKLPEPILKEEWRAQWLSEHGLDTVPYKEAAGLNLIIKNAVNTYKGVQVKVDNKNKNNLAKINRKNEIAKLNGEQEISFEEIKAFDDKGYLLQKPSPNKSIYCYQSVSPKPFITSKYHNVNLPEEYIGYYRKSNEPIVSPYQFDRLRIPIGEPGYVPKWQYTFLSKKENKRRKLSKRIKNVSPILGIICIKKDWCVFDMRGLLRTNHWKKYHKPTDSINDLFDYFTGDPVIDTKANVVRFRYKMENGIVNYKPVREKKGKELLENICDQNGSCKLATVDVGQNNPVAIGLFELKKVNGELTKTLISRHPTPIDFCNKITAYRERYDKLESSIKLDAIKQLTSEQKIEVDNYNNNFTPQNTKQIVCSKLNINPNDLPWDKMISGTHFISEKAQVSNKSEIYFTSTDKGKTKDVMKSDYKWFQDYKPKLSKEVRDALSDIEWRLRRESLEFNKLSKSREQDARQLANWISSMCDVIGIENLVKKNNFFGGSGKREPGWDNFYKPKKENRWWINAIHKALTELSQNKGKRVILLPAMRTSITCPKCKYCDSKNRNGEKFNCLKCGIELNADIDVATENLATVAITAQSMPKPTCERSGDAKKPVRARKAKAPEFHDKLAPSYTVVLREAV

SEQ ID NO: 229 - protein, 793 aa, synthetic construct
  REGION 1..793: note = Casphi-9 polypeptide sequence
MRSSREIGDKILMRQPAEKTAFQVFRQEVIGTQKLSGGDAKTAGRLYKQGKMEAAREWLLKGARDDVPPNFQPPAKCLVVAVSHPFEEWDISKTNHDVQAYIYAQPLQAEGHLNGLSEKWEDTSADQHKLWFEKTGVPDRGLPVQAINKIAKAAVNRAFGVVRKVENRNEKRRSRDNRIAEHNRENGLTEVVREAPEVATNADGFLLHPPGIDPSILSYASVSPVPYNSSKHSFVRLPEEYQAYNVEPDAPIPQFVVEDRFAIPPGQPGYVPEWQRLKCSTNKHRRMRQWSNQDYKPKAGRRAKPLEFQAHLTRERAKGALLVVMRIKEDWVVFDVRGLLRNVEWRKVLSEEAREKLTLKGLLDLFTGDPVIDTKRGIVTFLYKAEITKILSKRTVKTKNARDLLLRLTEPGEDGLRREVGLVAVDLGQTHPIAAAIYRIGRTSAGALESTVLHRQGLREDQKEKLKEYRKRHTALDSRLRKEAFETLSVEQQKEIVTVSGSGAQITKDKVCNYLGVDPSTLPWEKMGSYTHFISDDFLRRGGDPNIVHFDRQPKKGKVSKKSQRIKRSDSQWVGRMRPRLSQETAKARMEADWAAQNENEEYKRLARSKQELARWCVNTLLQNTRCITQCDEIVVVIEDLNVKSLHGKGAREPGWDNFFTPKTENRWFIQILHKTFSELPKHRGEHVIEGCPLRTSITCPACSYCDKNSRNGEKFVCVACGATFHADFEVATYNLVRLATTGMPMPKSLERQGGGEKAGGARKARKKAKQVEKIVVQANANVTMNGASLHSP

SEQ ID NO: 230 - protein, 812 aa, synthetic construct
  REGION 1..812: note = Casphi-10 polypeptide sequence
MDMLDTETNYATETPAQQQDYSPKPPKKAQRAPKGFSKKARPEKKPPKPITLFTQKHFSGVRFLKRVIRDASKILKLSESRTITFLEQAIERDGSAPPDVTPPVHNTIMAVTRPFEEWPEVILSKALQKHCYALTKKIKIKTWPKKGPGKKCLAAWSARTKIPLIPGQVQATNGLFDRIGSIYDGVEKKVTNRNANKKLEYDEAIKEGRNPAVPEYETAYNIDGTLINKPGYNPNLYITQSRTPRLITEADRPLVEKILWQMVEKKTQSRNQARRARLEKAAHLQGLPVPKFVPEKVDRSQKIEIRIIDPLDKIEPYMPQDRMAIKASQDGHVPYWQRPFLSKRRNRRVRAGWGKQVSSIQAWLTGALLVIVRLGNEAFLADIRGALRNAQWRKLLKPDATYQSLFNLFTGDPVVNTRTNHLTMAYREGVVNIVKSRSFKGRQTREHLLTLLGQGKTVAGVSFDLGQKHAAGLLAAHFGLGEDGNPVFTPIQACFLPQRYLDSLTNYRNRYDALTLDMRRQSLLALTPAQQQEFADAQRDPGGQAKRACCLKLNLNPDEIRWDLVSGISTMISDLYIERGGDPRDVHQQVETKPKGKRKSEIRILKIRDGKWAYDFRPKIADETRKAQREQLWKLQKASSEFERLSRYKINIARAIANWALQWGRELSGCDIVIPVLEDLNVGSKFFDGKGKWLLGWDNRFTPKKENRWFIKVLHKAVAELAPHRGVPVYEVMPHRTSMTCPACHYCHPTNREGDRFECQSCHVVKNTDRDVAPYNILRVAVEGKTLDRWQAEKKPQAEPDRPMILIDNQES

SEQ ID NO: 231 - protein, 84 aa, synthetic construct
  REGION 1..84: note = synthetic polypeptide sequence
MTNLSDIIEKETGKQLVIQESILMLPEEVEEVIGNKPESDILVHTAYDESTDENVMLLTSDAPEYKPWALVIQDSNGENKIKML

SEQ ID NO: 232 - protein, 1129 aa, Alicyclobacillus acidoterrestris
  REGION 1..1129: note = MISC_FEATURE - Cas12b/C2c1; sp|T0D7A2|C2C1_ALIAG CRISPR-associated endonuclease C2c1 OS = Alicyclobacillus acido-terrestris (strain ATCC 49025 /DSM 3922/ CIP 106132 / NCIMB 13137/GD3B) GN=c2c1 PE=1 SV=1; Cas12b/C2c1 polypeptide sequence
MAVKSIKVKLRLDDMPEIRAGLWKLHKEVNAGVRYYTEWLSLLRQENLYRRSPNGDGEQECDKTAEECKAELLERLRARQVENGHRGPAGSDDELLQLARQLYELLVPQAIGAKGDAQQIARKFLSPLADKDAVGGLGIAKAGNKPRWVRMREAGEPGWEEEKEKAETRKSADRTADVLRALADFGLKPLMRVYTDSEMSSVEWKPLRKGQAVRTWDRDMFQQAIERMMSWESWNQRVGQEYAKLVEQKNRFEQKNFVGQEHLVHLVNQLQQDMKEASPGLESKEQTAHYVTGRALRGSDKVFEKWGKLAPDAPFDLYDAEIKNVQRRNTRRFGSHDLFAKLAEPEYQALWREDASFLTRYAVYNSILRKLNHAKMFATFTLPDATAHPIWTRFDKLGGNLHQYTFLFNEFGERRHAIRFHKLLKVENGVAREVDDVTVPISMSEQLDNLLPRDPNEPIALYFRDYGAEQHFTGEFGGAKIQCRRDQLAHMHRRRGARDVYLNVSVRVQSQSEARGERRPPYAAVFRLVGDNHRAFVHFDKLSDYLAEHPDDGKLGSEGLLSGLRVMSVDLGLRTSASISVFRVARKDELKPNSKGRVPFFFPIKGNDNLVAVHERSQLLKLPGETESKDLRAIREERQRTLRQLRTQLAYLRLLVRCGSEDVGRRERSWAKLIEQPVDAANHMTPDWREAFENELQKLKSLHGICSDKEWMDAVYESVRRVWRHMGKQVRDWRKDVRSGERPKIRGYAKDVVGGNSIEQIEYLERQYKFLKSWSFFGKVSGQVIRAEKGSRFAITLREHIDHAKEDRLKKLADRIIMEALGYVYALDERGKGKWVAKYPPCQLILLEELSEYQFNNDRPPSENNQLMQWSHRGVFQELINQAQVHDLLVGTMYAAFSSRFDARTGAPGIRCRRVPARCTQEHNPEPFPWWLNKFVVEHTLDACPLRADDLIPTGEGEIFVSPFSAEEGDFHQIHADLNAAQNLQQRLWSDFDISQIRLRCDWGEVDGELVLIPRLTGKRTADSYSNKVFYTNTGVTYYERERGKKRRKVFAQEKLSEEEAELLVEADEAREKSVVLMRDPSGIINRGNWTRQKEFWSMVNQRIEGYLVKQIRSRVPLQDSACENTGDI

SEQ ID NO: 233 - protein, 1368 aa, Mus musculus
  REGION 1..1368: note = MISC_FEATURE - high fidelity Cas9 polypeptide sequence
MDKKYSIGLAIGTNSVGWAVITDEYKVPSKKFKVLGNTDRHSIKKNLIGALLFDSGETAEATRLKRTARRRYTRRKNRICYLQEIFSNEMAKVDDSFFHRLEESFLVEEDKKHERHPIFGNIVDEVAYHEKYPTIYHLRKKLVDSTDKADLRLIYLALAHMIKFRGHFLIEGDLNPDNSDVDKLFIQLVQTYNQLFEENPINASGVDAKAILSARLSKSRRLENLIAQLPGEKKNGLFGNLIALSLGLTPNFKSNFDLAEDAKLQLSKDTYDDDLDNLLAQIGDQYADLFLAAKNLSDAILLSDILRVNTEITKAPLSASMIKRYDEHHQDLTLLKALVRQQLPEKYKEIFFDQSKNGYAGYIDGGASQEEFYKFIKPILEKMDGTEELLVKLNREDLLRKQRTFDNGSIPHQIHLGELHAILRRQEDFYPFLKDNREKIEKILTFRIPYYVGPLARGNSRFAWMTRKSEETITPWNFEEVVDKGASAQSFIERMTAFDKNLPNEKVLPKHSLLYEYFTVYNELTKVKYVTEGMRKPAFLSGEQKKAIVDLLFKTNRKVTVKQLKEDYFKKIECFDSVEISGVEDRFNASLGTYHDLLKIIKDKDFLDNEENEDILEDIVLTLTLFEDREMIEERLKTYAHLFDDKVMKQLKRRRYTGWGALSRKLINGIRDKQSGKTILDFLKSDGFANRNFMALIHDDSLTFKEDIQKAQVSGQGDSLHEHIANLAGSPAIKKGILQTVKVVDELVKVMGRHKPENIVIEMARENQTTQKGQKNSRERMKRIEEGIKELGSQILKEHPVENTQLQNEKLYLYYLQNGRDMYVDQELDINRLSDYDVDHIVPQSFLKDDSIDNKVLTRSDKNRGKSDNVPSEEVVKKMKNYWRQLLNAKLITQRKFDNLTKAERGGLSELDKAGFIKRQLVETRAITKHVAQILDSRMNTKYDENDKLIREVKVITLKSKLVSDFRKDFQFYKVREINNYHHAHDAYLNAVVGTALIKKYPKLESEFVYGDYKVYDVRKMIAKSEQEIGKATAKYFFYSNIMNFFKTEITLANGEIRKRPLIETNGETGEIVWDKGRDFATVRKVLSMPQVNIVKKTEVQTGGFSKESILPKRNSDKLIARKKDWDPKKYGGFDSPTVAYSVLVVAKVEKGKSKKLKSVKELLGITIMERSSFEKNPIDFLEAKGYKEVKKDLIIKLPKYSLFELENGRKRMLASAGELQKGNELALPSKYVNFLYLASHYEKLKGSPEDNEQKQLFVEQHKHYLDEIIEQISEFSKRVILADANLDKVLSAYNKHRDKPIREQAENIIHLFTLTNLGAPAAFKYFDTTIDRKRYTSTKEVLDATLIHQSITGLYETRIDLSQLGGD

SEQ ID NO: 234 - protein, 1368 aa, Streptococcus pyogenes
  REGION 1..1368: note = MISC_FEATURE - PAM-binding SpEQR Cas9 polypeptide sequence
MDKKYSIGLAIGTNSVGWAVITDEYKVPSKKFKVLGNTDRHSIKKNLIGALLFDSGETAEATRLKRTARRRYTRRKNRICYLQEIFSNEMAKVDDSFFHRLEESVLVEEDKKHERHPIFGNIVDEVAYHEKYPTIYHLRKKLVDSTDKADLRLIYLALAHMIKFRGHFLIEGDLNPDNSDVDKLFIQLVQTYNQLFEENPINASGVDAKAILSARLSKSRRLENLIAQLPGEKKNGLFGNLIALSLGLTPNFKSNFDLAEDAKLQLSKDTYDDDLDNLLAQIGDQYADLFLAAKNLSDAILLSDILRVNTEITKAPLSASMIKRYDEHHQDLTLLKALVRQQLPEKYKEIFFDQSKNGYAGYIDGGASQEEFYKFIKPILEKMDGTEELLVKLNREDLLRKQRTFDNGSIPHQIHLGELHAILRRQEDFYPFLKDNREKIEKILTFRIPYYVGPLARGNSRFAWMTRKSEETITPWNFEEVVDKGASAQSFIERMTNFDKNLPNEKVLPKHSLLYEYFTVYNELTKVKYVTEGMRKPAFLSGEQKKAIVDLLFKTNRKVTVKQLKEDYFKKIECFDSVEISGVEDRFNASLGTYHDLLKIIKDKDFLDNEENEDILEDIVLTLTLFEDREMIEERLKTYAHLFDDKVMKQLKRRRYTGWGRLSRKLINGIRDKQSGKTILDFLKSDGFANRNFMQLIHDDSLTFKEDIQKAQVSGQGDSLHEHIANLAGSPAIKKGILQTVKVVDELVKVMGRHKPENIVIEMARENQTTQKGQKNSRERMKRIEEGIKELGSQILKEHPVENTQLQNEKLYLYYLQNGRDMYVDQELDINRLSDYDVDHIVPQSFLKDDSIDNKVLTRSDKNRGKSDNVPSEEVVKKMKNYWRQLLNAKLITQRKFDNLTKAERGGLSELDKAGFIKRQLVETRQITKHVAQILDSRMNTKYDENDKLIREVKVITLKSKLVSDFRKDFQFYKVREINNYHHAHDAYLNAVVGTALIKKYPKLESEFVYGDYKVYDVRKMIAKSEQEIGKATAKYFFYSNIMNFFKTEITLANGEIRKRPLIETNGETGEIVWDKGRDFATVRKVLSMPQVNIVKKTEVQTGGFSKESILPKRNSDKLIARKKDWDPKKYGGFESPTVAYSVLVVAKVEKGKSKKLKSVKELLGITIMERSSFEKNPIDFLEAKGYKEVKKDLIIKLPKYSLFELENGRKRMLASAGELQKGNELALPSKYVNFLYLASHYEKLKGSPEDNEQKQLFVEQHKHYLDEIIEQISEFSKRVILADANLDKVLSAYNKHRDKPIREQAENIIHLFTLTNLGAPAAFKYFDTTIDRKQYRSTKEVLDATLIHQSITGLYETRIDLSQLGGD

SEQ ID NO: 235 - protein, 1368 aa, Streptococcus pyogenes
  REGION 1..1368: note = MISC_FEATURE - PAM-binding SpVQR Cas9 polypeptide sequence
MDKKYSIGLAIGTNSVGWAVITDEYKVPSKKFKVLGNTDRHSIKKNLIGALLFDSGETAEATRLKRTARRRYTRRKNRICYLQEIFSNEMAKVDDSFFHRLEESFLVEEDKKHERHPIFGNIVDEVAYHEKYPTIYHLRKKLVDSTDKADLRLIYLALAHMIKFRGHFLIEGDLNPDNSDVDKLFIQLVQTYNQLFEENPINASGVDAKAILSARLSKSRRLENLIAQLPGEKKNGLFGNLIALSLGLTPNFKSNFDLAEDAKLQLSKDTYDDDLDNLLAQIGDQYADLFLAAKNLSDAILLSDILRVNTEITKAPLSASMIKRYDEHHQDLTLLKALVRQQLPEKYKEIFFDQSKNGYAGYIDGGASQEEFYKFIKPILEKMDGTEELLVKLNREDLLRKQRTFDNGSIPHQIHLGELHAILRRQEDFYPFLKDNREKIEKILTFRIPYYVGPLARGNSRFAWMTRKSEETITPWNFEEVVDKGASAQSFIERMTNFDKNLPNEKVLPKHSLLYEYFTVYNELTKVKYVTEGMRKPAFLSGEQKKAIVDLLFKTNRKVTVKQLKEDYFKKIECFDSVEISGVEDRFNASLGTYHDLLKIIKDKDFLDNEENEDILEDIVLTLTLFEDREMIEERLKTYAHLFDDKVMKQLKRRRYTGWGRLSRKLINGIRDKQSGKTILDFLKSDGFANRNFMQLIHDDSLTFKEDIQKAQVSGQGDSLHEHIANLAGSPAIKKGILQTVKVVDELVKVMGRHKPENIVIEMARENQTTQKGQKNSRERMKRIEEGIKELGSQILKEHPVENTQLQNEKLYLYYLQNGRDMYVDQELDINRLSDYDVDHIVPQSFLKDDSIDNKVLTRSDKNRGKSDNVPSEEVVKKMKNYWRQLLNAKLITQRKFDNLTKAERGGLSELDKAGFIKRQLVETRQITKHVAQILDSRMNTKYDENDKLIREVKVITLKSKLVSDFRKDFQFYKVREINNYHHAHDAYLNAVVGTALIKKYPKLESEFVYGDYKVYDVRKMIAKSEQEIGKATAKYFFYSNIMNFFKTEITLANGEIRKRPLIETNGETGEIVWDKGRDFATVRKVLSMPQVNIVKKTEVQTGGFSKESILPKRNSDKLIARKKDWDPKKYGGFVSPTVAYSVLVVAKVEKGKSKKLKSVKELLGITIMERSSFEKNPIDFLEAKGYKEVKKDLIIKLPKYSLFELENGRKRMLASAGELQKGNELALPSKYVNFLYLASHYEKLKGSPEDNEQKQLFVEQHKHYLDEIIEQISEFSKRVILADANLDKVLSAYNKHRDKPIREQAENIIHLFTLTNLGAPAAFKYFDTTIDRKQYRSTKEVLDATLIHQSITGLYETRIDLSQLGGD

SEQ ID NO: 236 - protein, 1368 aa, Streptococcus pyogenes
  REGION 1..1368: note = MISC_FEATURE - SpVQR Cas9 polypeptide sequence
MDKKYSIGLAIGTNSVGWAVITDEYKVPSKKFKVLGNTDRHSIKKNLIGALLFDSGETAEATRLKRTARRRYTRRKNRICYLQEIFSNEMAKVDDSFFHRLEESFLVEEDKKHERHPIFGNIVDEVAYHEKYPTIYHLRKKLVDSTDKADLRLIYLALAHMIKFRGHFLIEGDLNPDNSDVDKLFIQLVQTYNQLFEENPINASGVDAKAILSARLSKSRRLENLIAQLPGEKKNGLFGNLIALSLGLTPNFKSNFDLAEDAKLQLSKDTYDDDLDNLLAQIGDQYADLFLAAKNLSDAILLSDILRVNTEITKAPLSASMIKRYDEHHQDLTLLKALVRQQLPEKYKEIFFDQSKNGYAGYIDGGASQEEFYKFIKPILEKMDGTEELLVKLNREDLLRKQRTFDNGSIPHQIHLGELHAILRRQEDFYPFLKDNREKIEKILTFRIPYYVGPLARGNSRFAWMTRKSEETITPWNFEEVVDKGASAQSFIERMTNFDKNLPNEKVLPKHSLLYEYFTVYNELTKVKYVTEGMRKPAFLSGEQKKAIVDLLFKTNRKVTVKQLKEDYFKKIECFDSVEISGVEDRFNASLGTYHDLLKIIKDKDFLDNEENEDILEDIVLTLTLFEDREMIEERLKTYAHLFDDKVMKQLKRRRYTGWGRLSRKLINGIRDKQSGKTILDFLKSDGFANRNFMQLIHDDSLTFKEDIQKAQVSGQGDSLHEHIANLAGSPAIKKGILQTVKVVDELVKVMGRHKPENIVIEMARENQTTQKGQKNSRERMKRIEEGIKELGSQILKEHPVENTQLQNEKLYLYYLQNGRDMYVDQELDINRLSDYDVDHIVPQSFLKDDSIDNKVLTRSDKNRGKSDNVPSEEVVKKMKNYWRQLLNAKLITQRKFDNLTKAERGGLSELDKAGFIKRQLVETRQITKHVAQILDSRMNTKYDENDKLIREVKVITLKSKLVSDFRKDFQFYKVREINNYHHAHDAYLNAVVGTALIKKYPKLESEFVYGDYKVYDVRKMIAKSEQEIGKATAKYFFYSNIMNFFKTEITLANGEIRKRPLIETNGETGEIVWDKGRDFATVRKVLSMPQVNIVKKTEVQTGGFSKESILPKRNSDKLIARKKDWDPKKYGGFVSPTVAYSVLVVAKVEKGKSKKLKSVKELLGITIMERSSFEKNPIDFLEAKGYKEVKKDLIIKLPKYSLFELENGRKRMLASARELQKGNELALPSKYVNFLYLASHYEKLKGSPEDNEQKQLFVEQHKHYLDEIIEQISEFSKRVILADANLDKVLSAYNKHRDKPIREQAENIIHLFTLTNLGAPAAFKYFDTTIDRKEYRSTKEVLDATLIHQSITGLYETRIDLSQLGGD

SEQ ID NO: 237 - protein, 1359 aa, Streptococcus macacae
  REGION 1..1359: note = MISC_FEATURE - SpyMacCas9 polypeptide sequence
MDKKYSIGLDIGTNSVGWAVITDDYKVPSKKFKVLGNTDRHSIKKNLIGALLFGSGETAEATRLKRTARRRYTRRKNRICYLQEIFSNEMAKVDDSFFHRLEESFLVEEDKKHERHPIFGNIVDEVAYHEKYPTIYHLRKKLADSTDKADLRLIYLALAHMIKFRGHFLIEGDLNPDNSDVDKLFIQLVQIYNQLFEENPINASRVDAKAILSARLSKSRRLENLIAQLPGEKRNGLFGNLIALSLGLTPNFKSNFDLAEDAKLQLSKDTYDDDLDNLLAQIGDQYADLFLAAKNLSDAILLSDILRVNSEITKAPLSASMIKRYDEHHQDLTLLKALVRQQLPEKYKEIFFDQSKNGYAGYIDGGASQEEFYKFIKPILEKMDGTEELLVKLNREDLLRKQRTFDNGSIPHQIHLGELHAILRRQEDFYPFLKDNREKIEKILTFRIPYYVGPLARGNSRFAWMTRKSEETITPWNFEEVVDKGASAQSFIERMTNFDKNLPNEKVLPKHSLLYEYFTVYNELTKVKYVTEGMRKPAFLSGEQKKAIVDLLFKTNRKVTVKQLKEDYFKKIECFDSVEISGVEDRFNASLGAYHDLLKIIKDKDFLDNEENEDILEDIVLTLTLFEDRGMIEERLKTYAHLFDDKVMKQLKRRRYTGWGRLSRKLINGIRDKQSGKTILDFLKSDGFANRNFMQLIHDDSLTFKEDIQKAQVSGQGHSLHEQIANLAGSPAIKKGILQTVKIVDELVKVMGHKPENIVIEMARENQTTQKGQKNSRERMKRIEEGIKELGSQILKEHPVENTQLQNEKLYLYYLQNGRDMYVDQELDINRLSDYDVDHIVPQSFIKDDSIDNKVLTRSDKNRGKSDNVPSEEVVKKMKNYWRQLLNAKLITQRKFDNLTKAERGGLSELDKAGFIKRQLVETRQITKHVAQILDSRMNTKYDENDKLIREVKVITLKSKLVSDFRKDFQFYKVREINNYHHAHDAYLNAVVGTALIKKYPKLESEFVYGDYKVYDVRKMIAKSEQEIGKATAKYFFYSNIMNFFKTEITLANGEIRKRPLIETNGETGEIVWDKGRDFATVRKVLSMPQVNIVKKTEIQTVGQNGGLFDDNPKSPLEVTPSKLVPLKKELNPKKYGGYQKPTTAYPVLLITDTKQLIPISVMNKKQFEQNPVKFLRDRGYQQVGKNDFIKLPKYTLVDIGDGIKRLWASSKEIHKGNQLVVSKKSQILLYHAHHLDSDLSNDYLQNHNQQFDVLFNEIISFSKKCKLGKEHIQKIENVYSNKKNSASIEELAESFIKLLGFTQLGATSPFNFLGVKLNQKQYKGKKDYILPCTEGTLIRQSITGLYETRVDLSKIGED

SEQ ID NO: 238 - protein, 1410 aa, synthetic construct
  REGION 1..1410: note = CP5 polypeptide sequence
  REGION 1..341: note = MISC_FEATURE - Sequence derived from Cas9
  REGION 342..362: note = MISC_FEATURE - Linker sequence
  REGION 363..1388: note = MISC_FEATURE - Sequence derived from Cas9
  REGION 1389..1410: note = MISC_FEATURE - Bipartite nuclear localization sequence
EIGKATAKYFFYSNIMNFFKTEITLANGEIRKRPLIETNGETGEIVWDKGRDFATVRKVLSMPQVNIVKKTEVQTGGFSKESILPKRNSDKLIARKKDWDPKKYGGFMQPTVAYSVLVVAKVEKGKSKKLKSVKELLGITIMERSSFEKNPIDFLEAKGYKEVKKDLIIKLPKYSLFELENGRKRMLASAKFLQKGNELALPSKYVNFLYLASHYEKLKGSPEDNEQKQLFVEQHKHYLDEIIEQISEFSKRVILADANLDKVLSAYNKHRDKPIREQAENIIHLFTLTNLGAPRAFKYFDTTIARKEYRSTKEVLDATLIHQSITGLYETRIDLSQLGGDGGSGGSGGSGGSGGSGGSGGMDKKYSIGLAIGTNSVGWAVITDEYKVPSKKFKVLGNTDRHSIKKNLIGALLFDSGETAEATRLKRTARRRYTRRKNRICYLQEIFSNEMAKVDDSFFHRLEESFLVEEDKKHERHPIFGNIVDEVAYHEKYPTIYHLRKKLVDSTDKADLRLIYLALAHMIKFRGHFLIEGDLNPDNSDVDKLFIQLVQTYNQLFEENPINASGVDAKAILSARLSKSRRLENLIAQLPGEKKNGLFGNLIALSLGLTPNFKSNFDLAEDAKLQLSKDTYDDDLDNLLAQIGDQYADLFLAAKNLSDAILLSDILRVNTEITKAPLSASMIKRYDEHHQDLTLLKALVRQQLPEKYKEIFFDQSKNGYAGYIDGGASQEEFYKFIKPILEKMDGTEELLVKLNREDLLRKQRTFDNGSIPHQIHLGELHAILRRQEDFYPFLKDNREKIEKILTFRIPYYVGPLARGNSRFAWMTRKSEETITPWNFEEVVDKGASAQSFIERMTNFDKNLPNEKVLPKHSLLYEYFTVYNELTKVKYVTEGMRKPAFLSGEQKKAIVDLLFKTNRKVTVKQLKEDYFKKIECFDSVEISGVEDRFNASLGTYHDLLKIIKDKDFLDNEENEDILEDIVLTLTLFEDREMIEERLKTYAHLFDDKVMKQLKRRRYTGWGRLSRKLINGIRDKQSGKTILDFLKSDGFANRNFMQLIHDDSLTFKEDIQKAQVSGQGDSLHEHIANLAGSPAIKKGILQTVKVVDELVKVMGRHKPENIVIEMARENQTTQKGQKNSRERMKRIEEGIKELGSQILKEHPVENTQLQNEKLYLYYLQNGRDMYVDQELDINRLSDYDVDHIVPQSFLKDDSIDNKVLTRSDKNRGKSDNVPSEEVVKKMKNYWRQLLNAKLITQRKFDNLTKAERGGLSELDKAGFIKRQLVETRQITKHVAQILDSRMNTKYDENDKLIREVKVITLKSKLVSDFRKDFQFYKVREINNYHHAHDAYLNAVVGTALIKKYPKLESEFVYGDYKVYDVRKMIAKSEQEGADKRTADGSEFESPKKKRKV

SEQ ID NO: 239 - protein, 1302 aa, synthetic construct
  REGION 1..1302: note = Cas12c1 polypeptide sequence
MQTKKTHLHLISAKASRKYRRTIACLSDTAKKDLERRKQSGAADPAQELSCLKTIKFKLEVPEGSKLPSFDRISQIYNALETIEKGSLSYLLFALILSGFRIFPNSSAAKTFASSSCYKNDQFASQIKEIFGEMVKNFIPSELESILKKGRRKNNKDWTEENIKRVLNSEFGRKNSEGSSALFDSFLSKFSQELFRKFDSWNEVNKKYLEAAELLDSMLASYGPFDSVCKMIGDSDSRNSLPDKSTIAFTNNAEITVDIESSVMPYMAIAALLREYRQSKSKAAPVAYVQSHLTTTNGNGLSWFFKFGLDLIRKAPVSSKQSTSDGSKSLQELFSVPDDKLDGLKFIKEACEALPEASLLCGEKGELLGYQDFRTSFAGHIDSWVANYVNRLFELIELVNQLPESIKLPSILTQKNHNLVASLGLQEAEVSHSLELFEGLVKNVRQTLKKLAGIDISSSPNEQDIKEFYAFSDVLNRLGSIRNQIENAVQTAKKDKIDLESAIEWKEWKKLKKLPKLNGLGGGVPKQQELLDKALESVKQIRHYQRIDFERVIQWAVNEHCLETVPKFLVDAEKKKINKESSTDFAAKENAVRFLLEGIGAAARGKTDSVSKAAYNWFVVNNFLAKKDLNRYFINCQGCIYKPPYSKRRSLAFALRSDNKDTIEVVWEKFETFYKEISKEIEKFNIFSQEFQTFLHLENLRMKLLLRRIQKPIPAEIAFFSLPQEYYDSLPPNVAFLALNQEITPSEYITQFNLYSSFLNGNLILLRRSRSYLRAKFSWVGNSKLIYAAKEARLWKIPNAYWKSDEWKMILDSNVLVFDKAGNVLPAPTLKKVCEREGDLRLFYPLLRQLPHDWCYRNPFVKSVGREKNVIEVNKEGEPKVASALPGSLFRLIGPAPFKSLLDDCFFNPLDKDLRECMLIVDQEISQKVEAQKVEASLESCTYSIAVPIRYHLEEPKVSNQFENVLAIDQGEAGLAYAVFSLKSIGEAETKPIAVGTIRIPSIRRLIHSVSTYRKKKQRLQNFKQNYDSTAFIMRENVTGDVCAKIVGLMKEFNAFPVLEYDVKNLESGSRQLSAVYKAVNSHFLYFKEPGRDALRKQLWYGGDSWTIDGIEIVTRERKEDGKEGVEKIVPLKVFPGRSVSARFTSKTCSCCGRNVFDWLFTEKKAKTNKKFNVNSKGELTTADGVIQLFEADRSKGPKFYARRKERTPLTKPIAKGSYSLEEIERRVRTNLRRAPKSKQSRDTSQSQYFCVYKDCALHFSGMQADENAAINIGRRFLTALRKNRRSDFPSNVKISDRLLDN

SEQ ID NO: 240 - protein, 1218 aa, synthetic construct
  REGION 1..1218: note = Cas12c2 polypeptide sequence
MTKHSIPLHAFRNSGADARKWKGRIALLAKRGKETMRTLQFPLEMSEPEAAAINTTPFAVAYNAIEGTGKGTLFDYWAKLHLAGFRFFPSGGAATIFRQQAVFEDASWNAAFCQQSGKDWPWLVPSKLYERFTKAPREVAKKDGSKKSIEFTQENVANESHVSLVGASITDKTPEDQKEFFLKMAGALAEKFDSWKSANEDRIVAMKVIDEFLKSEGLHLPSLENIAVKCSVETKPDNATVAWHDAPMSGVQNLAIGVFATCASRIDNIYDLNGGKLSKLIQESATTPNVTALSWLFGKGLEYFRTTDIDTIMQDFNIPASAKESIKPLVESAQAIPTMTVLGKKNYAPFRPNFGGKIDSWIANYASRLMLLNDILEQIEPGFELPQALLDNETLMSGIDMTGDELKELIEAVYAWVDAAKQGLATLLGRGGNVDDAVQTFEQFSAMMDTLNGTLNTISARYVRAVEMAGKDEARLEKLIECKFDIPKWCKSVPKLVGISGGLPKVEEEIKVMNAAFKDVRARMFVRFEEIAAYVASKGAGMDVYDALEKRELEQIKKLKSAVPERAHIQAYRAVLHRIGRAVQNCSEKTKQLFSSKVIEMGVFKNPSHLNNFIFNQKGAIYRSPFDRSRHAPYQLHADKLLKNDWLELLAEISATLMASESTEQMEDALRLERTRLQLQLSGLPDWEYPASLAKPDIEVEIQTALKMQLAKDTVTSDVLQRAFNLYSSVLSGLTFKLLRRSFSLKMRFSVADTTQLIYVPKVCDWAIPKQYLQAEGEIGIAARVVTESSPAKMVTEVEMKEPKALGHFMQQAPHDWYFDASLGGTQVAGRIVEKGKEVGKERKLVGYRMRGNSAYKTVLDKSLVGNTELSQCSMIIEIPYTQTVDADFRAQVQAGLPKVSINLPVKETITASNKDEQMLFDRFVAIDLGERGLGYAVFDAKTLELQESGHRPIKAITNLLNRTHHYEQRPNQRQKFQAKFNVNLSELRENTVGDVCHQINRICAYYNAFPVLEYMVPDRLDKQLKSVYESVTNRYIWSSTDAHKSARVQFWLGGETWEHPYLKSAKDKKPLVLSPGRGASGKGTSQTCSCCGRNPFDLIKDMKPRAKIAVVDGKAKLENSELKLFERNLESKDDMLARRHRNERAGMEQPLTPGNYTVDEIKALLRANLRRAPKNRRTKDTTVSEYHCVFSDCGKTMHADENAAVNIGGKFIADIEK

SEQ ID NO: 241 - protein, 1252 aa, Oleiphilus sp.
  REGION 1..1252: note = MISC_FEATURE - OspCas12c polypeptide sequence
MTKLRHRQKKLTHDWAGSKKREVLGSNGKLQNPLLMPVKKGQVTEFRKAFSAYARATKGEMTDGRKNMFTHSFEPFKTKPSLHQCELADKAYQSLHSYLPGSLAHFLLSAHALGFRIFSKSGEATAFQASSKIEAYESKLASELACVDLSIQNLTISTLFNALTTSVRGKGEETSADPLIARFYTLLTGKPLSRDTQGPERDLAEVISRKIASSFGTWKEMTANPLQSLQFFEEELHALDANVSLSPAFDVLIKMNDLQGDLKNRTIVFDPDAPVFEYNAEDPADIIIKLTARYAKEAVIKNQNVGNYVKNAITTTNANGLGWLLNKGLSLLPVSTDDELLEFIGVERSHPSCHALIELIAQLEAPELFEKNVFSDTRSEVQGMIDSAVSNHIARLSSSRNSLSMDSEELERLIKSFQIHTPHCSLFIGAQSLSQQLESLPEALQSGVNSADILLGSTQYMLTNSLVEESIATYQRTLNRINYLSGVAGQINGAIKRKAIDGEKIHLPAAWSELISLPFIGQPVIDVESDLAHLKNQYQTLSNEFDTLISALQKNFDLNFNKALLNRTQHFEAMCRSTKKNALSKPEIVSYRDLLARLTSCLYRGSLVLRRAGIEVLKKHKIFESNSELREHVHERKHFVFVSPLDRKAKKLLRLTDSRPDLLHVIDEILQHDNLENKDRESLWLVRSGYLLAGLPDQLSSSFINLPIITQKGDRRLIDLIQYDQINRDAFVMLVTSAFKSNLSGLQYRANKQSFVVTRTLSPYLGSKLVYVPKDKDWLVPSQMFEGRFADILQSDYMVWKDAGRLCVIDTAKHLSNIKKSVFSSEEVLAFLRELPHRTFIQTEVRGLGVNVDGIAFNNGDIPSLKTFSNCVQVKVSRTNTSLVQTLNRWFEGGKVSPPSIQFERAYYKKDDQIHEDAAKRKIRFQMPATELVHASDDAGWTPSYLLGIDPGEYGMGLSLVSINNGEVLDSGFIHINSLINFASKKSNHQTKVVPRQQYKSPYANYLEQSKDSAAGDIAHILDRLIYKLNALPVFEALSGNSQSAADQVWTKVLSFYTWGDNDAQNSIRKQHWFGASHWDIKGMLRQPPTEKKPKPYIAFPGSQVSSYGNSQRCSCCGRNPIEQLREMAKDTSIKELKIRNSEIQLFDGTIKLFNPDPSTVIERRRHNLGPSRIPVADRTFKNISPSSLEFKELITIVSRSIRHSPEFIAKKRGIGSEYFCAYSDCNSSLNSEANAAANVAQKFQKQLFFEL

SEQ ID NO: 242 - protein, 767 aa, synthetic construct
  REGION 1..767: note = Cas12g1 polypeptide sequence
MAQASSTPAVSPRPRPRYREERTLVRKLLPRPGQSKQEFRENVKKLRKAFLQFNADVSGVCQWAIQFRPRYGKPAEPTETFWKFFLEPETSLPPNDSRSPEFRRLQAFEAAAGINGAAALDDPAFTNELRDSILAVASRPKTKEAQRLFSRLKDYQPAHRMILAKVAAEWIESRYRRAHQNWERNYEEWKKEKQEWEQNHPELTPEIREAFNQIFQQLEVKEKRVRICPAARLLQNKDNCQYAGKNKHSVLCNQFNEFKKNHLQGKAIKFFYKDAEKYLRCGLQSLKPNVQGPFREDWNKYLRYMNLKEETLRGKNGGRLPHCKNLGQECEFNPHTALCKQYQQQLSSRPDLVQHDELYRKWRREYWREPRKPVFRYPSVKRHSIAKIFGENYFQADFKNSVVGLRLDSMPAGQYLEFAFAPWPRNYRPQPGETEISSVHLHFVGTRPRIGFRFRVPHKRSRFDCTQEELDELRSRTFPRKAQDQKFLEAARKRLLETFPGNAEQELRLLAVDLGTDSARAAFFIGKTFQQAFPLKIVKIEKLYEQWPNQKQAGDRRDASSKQPRPGLSRDHVGRHLQKMRAQASEIAQKRQELTGTPAPETTTDQAAKKATLQPFDLRGLTVHTARMIRDWARLNARQIIQLAEENQVDLIVLESLRGFRPPGYENLDQEKKRRVAFFAHGRIRRKVTEKAVERGMRVVTVPYLASSKVCAECRKKQKDNKQWEKNKKRGLFKCEGCGSQAQVDENAARVLGRVFWGEIELPTAIP

SEQ ID NO: 243 - protein, 870 aa, synthetic construct
  REGION 1..870: note = Cas12h1 polypeptide sequence
MKVHEIPRSQLLKIKQYEGSFVEWYRDLQEDRKKFASLLFRWAAFGYAAREDDGATYISPSQALLERRLLLGDAEDVAIKFLDVLFKGGAPSSSCYSLFYEDFALRDKAKYSGAKREFIEGLATMPLDKIIERIRQDEQLSKIPAEEWLILGAEYSPEEIWEQVAPRIVNVDRSLGKQLRERLGIKCRRPHDAGYCKILMEVVARQLRSHNETYHEYLNQTHEMKTKVANNLTNEFDLVCEFAEVLEEKNYGLGWYVLWQGVKQALKEQKKPTKIQIAVDQLRQPKFAGLLTAKWRALKGAYDTWKLKKRLEKRKAFPYMPNWDNDYQIPVGLTGLGVFTLEVKRTEVVVDLKEHGKLFCSHSHYFGDLTAEKHPSRYHLKFRHKLKLRKRDSRVEPTIGPWIEAALREITIQKKPNGVFYLGLPYALSHGIDNFQIAKRFFSAAKPDKEVINGLPSEMVVGAADLNLSNIVAPVKARIGKGLEGPLHALDYGYGELIDGPKILTPDGPRCGELISLKRDIVEIKSAIKEFKACQREGLTMSEETTTWLSEVESPSDSPRCMIQSRIADTSRRLNSFKYQMNKEGYQDLAEALRLLDAMDSYNSLLESYQRMHLSPGEQSPKEAKFDTKRASFRDLLRRRVAHTIVEYFDDCDIVFFEDLDGPSDSDSRNNALVKLLSPRTLLLYIRQALEKRGIGMVEVAKDGTSQNNPISGHVGWRNKQNKSEIYFYEDKELLVMDADEVGAMNILCRGLNHSVCPYSFVTKAPEKKNDEKKEGDYGKRVKRFLKDRYGSSNVRFLVASMGFVTVTTKRPKDALVGKRLYYHGGELVTHDLHNRMKDEIKYLVEKEVLARRVSLSDSTIKSYKSFAHV

SEQ ID NO: 244 - protein, 1093 aa, synthetic construct
  REGION 1..1093: note = Cas12i1 polypeptide sequence
MSNKEKNASETRKAYTTKMIPRSHDRMKLLGNFMDYLMDGTPIFFELWNQFGGGIDRDIISGTANKDKISDDLLLAVNWFKVMPINSKPQGVSPSNLANLFQQYSGSEPDIQAQEYFASNFDTEKHQWKDMRVEYERLLAELQLSRSDMHHDLKLMYKEKCIGLSLSTAHYITSVMFGTGAKNNRQTKHQFYSKVIQLLEESTQINSVEQLASIILKAGDCDSYRKLRIRCSRKGATPSILKIVQDYELGTNHDDEVNVPSLIANLKEKLGRFEYECEWKCMEKIKAFLASKVGPYYLGSYSAMLENALSPIKGMTTKNCKFVLKQIDAKNDIKYENEPFGKIVEGFFDSPYFESDTNVKWVLHPHHIGESNIKTLWEDLNAIHSKYEEDIASLSEDKKEKRIKVYQGDVCQTINTYCEEVGKEAKTPLVQLLRYLYSRKDDIAVDKIIDGITFLSKKHKVEKQKINPVIQKYPSFNFGNNSKLLGKIISPKDKLKHNLKCNRNQVDNYIWIEIKVLNTKTMRWEKHHYALSSTRFLEEVYYPATSENPPDALAARFRTKTNGYEGKPALSAEQIEQIRSAPVGLRKVKKRQMRLEAARQQNLLPRYTWGKDFNINICKRGNNFEVTLATKVKKKKEKNYKVVLGYDANIVRKNTYAAIEAHANGDGVIDYNDLPVKPIESGFVTVESQVRDKSYDQLSYNGVKLLYCKPHVESRRSFLEKYRNGTMKDNRGNNIQIDFMKDFEAIADDETSLYYFNMKYCKLLQSSIRNHSSQAKEYREEIFELLRDGKLSVLKLSSLSNLSFVMFKVAKSLIGTYFGHLLKKPKNSKSDVKAPPITDEDKQKADPEMFALRLALEEKRLNKVKSKKEVIANKIVAKALELRDKYGPVLIKGENISDTTKKGKKSSTNSFLMDWLARGVANKVKEMVMMHQGLEFVEVNPNFTSHQDPFVHKNPENTFRARYSRCTPSELTEKNRKEILSFLSDKPSKRPTNAYYNEGAMAFLATYGLKKNDVLGVSLEKFKQIMANILHQRSEDQLLFPSRGGMFYLATYKLDADATSVNWNGKQFWVCNADLVAAYNVGLVDIQKDFKKK

SEQ ID NO: 245 - protein, 1054 aa, synthetic construct
  REGION 1..1054: note = Cas12i2 polypeptide sequence
MSSAIKSYKSVLRPNERKNQLLKSTIQCLEDGSAFFFKMLQGLFGGITPEIVRFSTEQEKQQQDIALWCAVNWFRPVSQDSLTHTIASDNLVEKFEEYYGGTASDAIKQYFSASIGESYYWNDCRQQYYDLCRELGVEVSDLTHDLEILCREKCLAVATESNQNNSIISVLFGTGEKEDRSVKLRITKKILEAISNLKEIPKNVAPIQEIILNVAKATKETFRQVYAGNLGAPSTLEKFIAKDGQKEFDLKKLQTDLKKVIRGKSKERDWCCQEELRSYVEQNTIQYDLWAWGEMFNKAHTALKIKSTRNYNFAKQRLEQFKEIQSLNNLLVVKKLNDFFDSEFFSGEETYTICVHHLGGKDLSKLYKAWEDDPADPENAIVVLCDDLKNNFKKEPIRNILRYIFTIRQECSAQDILAAAKYNQQLDRYKSQKANPSVLGNQGFTWTNAVILPEKAQRNDRPNSLDLRIWLYLKLRHPDGRWKKHHIPFYDTRFFQEIYAAGNSPVDTCQFRTPRFGYHLPKLTDQTAIRVNKKHVKAAKTEARIRLAIQQGTLPVSNLKITEISATINSKGQVRIPVKFDVGRQKGTLQIGDRFCGYDQNQTASHAYSLWEVVKEGQYHKELGCFVRFISSGDIVSITENRGNQFDQLSYEGLAYPQYADWRKKASKFVSLWQITKKNKKKEIVTVEAKEKFDAICKYQPRLYKFNKEYAYLLRDIVRGKSLVELQQIRQEIFRFIEQDCGVTRLGSLSLSTLETVKAVKGIIYSYFSTALNASKNNPISDEQRKEFDPELFALLEKLELIRTRKKKQKVERIANSLIQTCLENNIKFIRGEGDLSTTNNATKKKANSRSMDWLARGVFNKIRQLAPMHNITLFGCGSLYTSHQDPLVHRNPDKAMKCRWAAIPVKDIGDWVLRKLSQNLRAKNIGTGEYYHQGVKEFLSHYELQDLEEELLKWRSDRKSNIPCWVLQNRLAEKLGNKEAVVYIPVRGGRIYFATHKVATGAVSIVFDQKQVWVCNADHVAAANIALTVKGIGEQSSDEENPDGSRIKLQLTS

SEQ ID NO: 246 - protein, 4 aa, synthetic construct
  REGION 1..4: note = synthetic peptide sequence
GGGS

SEQ ID NO: 247 - protein, 5 aa, synthetic construct
  REGION 1..5: note = synthetic peptide sequence
GGGGS

SEQ ID NO: 248 - protein, 5 aa, synthetic construct
  REGION 1..5: note = synthetic peptide sequence
EAAAK

SEQ ID NO: 249 - protein, 16 aa, synthetic construct
  REGION 1..16: note = synthetic peptide sequence
SGSETPGTSESATPES

SEQ ID NO: 250 - protein, 6 aa, synthetic construct
  REGION 1..6: note = linker peptide sequence
GGSGGS

SEQ ID NO: 251 - protein, 20 aa, synthetic construct
  REGION 1..20: note = synthetic peptide sequence
GSSGSETPGTSESATPESSG

SEQ ID NO: 252 - DNA, 18 bp, synthetic construct
  misc_feature 1..18: note = synthetic oligonucleotide sequence
  source 1..18: mol_type = other DNA
ggaggctctggaggaagc

SEQ ID NO: 253 - DNA, 60 bp, synthetic construct
  misc_feature 1..60: note = synthetic oligonucleotide sequence
  source 1..60: mol_type = other DNA
ggctcttctggatctgaaacacctggcacaagcgagagcgccacccctgagagctctggc

SEQ ID NO: 254 - protein, 1129 aa, Alicyclobacillus acidiphilus
  REGION 1..1129: note = MISC_FEATURE - AacCas12b polypeptide sequence
MAVKSMKVKLRLDNMPEIRAGLWKLHTEVNAGVRYYTEWLSLLRQENLYRRSPNGDGEQECYKTAEECKAELLERLRARQVENGHCGPAGSDDELLQLARQLYELLVPQAIGAKGDAQQIARKFLSPLADKDAVGGLGIAKAGNKPRWVRMREAGEPGWEEEKAKAEARKSTDRTADVLRALADFGLKPLMRVYTDSDMSSVQWKPLRKGQAVRTWDRDMFQQAIERMMSWESWNQRVGEAYAKLVEQKSRFEQKNFVGQEHLVQLVNQLQQDMKEASHGLESKEQTAHYLTGRALRGSDKVFEKWEKLDPDAPFDLYDTEIKNVQRRNTRRFGSHDLFAKLAEPKYQALWREDASFLTRYAVYNSIVRKLNHAKMFATFTLPDATAHPIWTRFDKLGGNLHQYTFLFNEFGEGRHAIRFQKLLTVEDGVAKEVDDVTVPISMSAQLDDLLPRDPHELVALYFQDYGAEQHLAGEFGGAKIQYRRDQLNHLHARRGARDVYLNLSVRVQSQSEARGERRPPYAAVFRLVGDNHRAFVHFDKLSDYLAEHPDDGKLGSEGLLSGLRVMSVDLGLRTSASISVFRVARKDELKPNSEGRVPFCFPIEGNENLVAVHERSQLLKLPGETESKDLRAIREERQRTLRQLRTQLAYLRLLVRCGSEDVGRRERSWAKLIEQPMDANQMTPDWREAFEDELQKLKSLYGICGDREWTEAVYESVRRVWRHMGKQVRDWRKDVRSGERPKIRGYQKDVVGGNSIEQIEYLERQYKFLKSWSFFGKVSGQVIRAEKGSRFAITLREHIDHAKEDRLKKLADRIIMEALGYVYALDDERGKGKWVAKYPPCQLILLEELSEYQFNNDRPPSENNQLMQWSHRGVFQELLNQAQVHDLLVGTMYAAFSSRFDARTGAPGIRCRRVPARCAREQNPEPFPWWLNKFVAEHKLDGCPLRADDLIPTGEGEFFVSPFSAEEGDFHQIHADLNAAQNLQRRLWSDFDISQIRLRCDWGEVDGEPVLIPRTTGKRTADSYGNKVFYTKTGVTYYERERGKKRRKVFAQEELSEEEAELLVEADEAREKSVVLMRDPSGIINRGDWTRQKEFWSMVNQRIEGYLVKQIRSRVRLQESACENTGDI

SEQ ID NO: 255 - protein, 1140 aa, Bacillus hisashii
  REGION 1..1140: note = MISC_FEATURE - BhCas12b polypeptide sequence
MAPKKKRKVGIHGVPAAATRSFILKIEPNEEVKKGLWKTHEVLNHGIAYYMNILKLIRQEAIYEHHEQDPKNPKKVSKAEIQAELWDFVLKMQKCNSFTHEVDKDEVFNILRELYEELVPSSVEKKGEANQLSNKFLYPLVDPNSQSGKGTASSGRKPRWYNLKIAGDPSWEEEKKKWEEDKKKDPLAKILGKLAEYGLIPLFIPYTDSNEPIVKEIKWMEKSRNQSVRRLDKDMFIQALERFLSWESWNLKVKEEYEKVEKEYKTLEERIKEDIQALKALEQYEKERQEQLLRDTLNTNEYRLSKRGLRGWREIIQKWLKMDENEPSEKYLEVFKDYQRKHPREAGDYSVYEFLSKKENHFIWRNHPEYPYLYATFCEIDKKKKDAKQQATFTLADPINHPLWVRFEERSGSNLNKYRILTEQLHTEKLKKKLTVQLDRLIYPTESGGWEEKGKVDIVLLPSRQFYNQIFLDIEEKGKHAFTYKDESIKFPLKGTLGGARVQFDRDHLRRYPHKVESGNVGRIYFNMTVNIEPTESPVSKSLKIHRDDFPKVVNFKPKELTEWIKDSKGKKLKSGIESLEIGLRVMSIDLGQRQAAAASIFEVVDQKPDIEGKLFFPIKGTELYAVHRASFNIKLPGETLVKSREVLRKAREDNLKLMNQKLNFLRNVLHFQQFEDITEREKRVTKWISRQENSDVPLVYQDELIQIRELMYKPYKDWVAFLKQLHKRLEVEIGKEVKHWRKSLSDGRKGLYGISLKNIDEIDRTRKFLLRWSLRPTEPGEVRRLEPGQRFAIDQLNHLNALKEDRLKKMANTIIMHALGYCYDVRKKKWQAKNPACQIILFEDLSNYNPYEERSRFENSKLMKWSRREIPRQVALQGEIYGLQVGEVGAQFSSRFHAKTGSPGIRCSVVTKEKLQDNRFFKNLQREGRLTLDKIAVLKEGDLYPDKGGEKFISLSKDRKCVTTHADINAAQNLQKRFWTRTHGFYKVYCKAYQVDGQTVYIPESKDQKQKIIEEFGEGYFILKDGVYEWVNAGKLKIKKGSSKQSSSELVDSDILKDSFDLASELKGEKLMLYRDPSGNVFPSDKWMAAGVFFGKLERILISKLTNQYSISTIEDDSSKQSMKRPAATKKAGQAKKKK

SEQ ID NO: 256 - protein, 1108 aa, Bacillus thermoamylovorans
  REGION 1..1108: note = MISC_FEATURE - BTCas12b polypeptide sequence
MATRSFILKIEPNEEVKKGLWKTHEVLNHGIAYYMNILKLIRQEAIYEHHEQDPKNPKKVSKAEIQAELWDFVLKMQKCNSFTHEVDKDVVFNILRELYEELVPSSVEKKGEANQLSNKFLYPLVDPNSQSGKGTASSGRKPRWYNLKIAGDPSWEEEKKKWEEDKKKDPLAKILGKLAEYGLIPLFIPFTDSNEPIVKEIKWMEKSRNQSVRRLDKDMFIQALERFLSWESWNLKVKEEYEKVEKEHKTLEERIKEDIQAFKSLEQYEKERQEQLLRDTLNTNEYRLSKRGLRGWREIIQKWLKMDENEPSEKYLEVFKDYQRKHPREAGDYSVYEFLSKKENHFIWRNHPEYPYLYATFCEIDKKKKDAKQQATFTLADPINHPLWVRFEERSGSNLNKYRILTEQLHTEKLKKKLTVQLDRLIYPTESGGWEEKGKVDIVLLPSRQFYNQIFLDIEEKGKHAFTYKDESIKFPLKGTLGGARVQFDRDHLRRYPHKVESGNVGRIYFNMTVNIEPTESPVSKSLKIHRDDFPKFVNFKPKELTEWIKDSKGKKLKSGIESLEIGLRVMSIDLGQRQAAAASIFEVVDQKPDIEGKLFFPIKGTELYAVHRASFNIKLPGETLVKSREVLRKAREDNLKLMNQKLNFLRNVLHFQQFEDITEREKRVTKWISRQENSDVPLVYQDELIQIRELMYKPYKDWVAFLKQLHKRLEVEIGKEVKHWRKSLSDGRKGLYGISLKNIDEIDRTRKFLLRWSLRPTEPGEVRRLEPGQRFAIDQLNHLNALKEDRLKKMANTIIMHALGYCYDVRKKKWQAKNPACQIILFEDLSNYNPYEERSRFENSKLMKWSRREIPRQVALQGEIYGLQVGEVGAQFSSRFHAKTGSPGIRCSVVTKEKLQDNRFFKNLQREGRLTLDKIAVLKEGDLYPDKGGEKFISLSKDRKLVTTHADINAAQNLQKRFWTRTHGFYKVYCKAYQVDGQTVYIPESKDQKQKIIEEFGEGYFILKDGVYEWGNAGKLKIKKGSSKQSSSELVDSDILKDSFDLASELKGEKLMLYRDPSGNVFPSDKWMAAGVFFGKLERILISKLTNQYSISTIEDDSSKQSM

SEQ ID NO: 257 - protein, 1112 aa, Bacillus sp.
  REGION 1..1112: note = MISC_FEATURE - BvCas12b (Bacillus sp. V3-13) polypeptide sequence
MAIRSIKLKMKTNSGTDSIYLRKALWRTHQLINEGIAYYMNLLTLYRQEAIGDKTKEAYQAELINIIRNQQRNNGSSEEHGSDQEILALLRQLYELIIPSSIGESGDANQLGNKFLYPLVDPNSQSGKGTSNAGRKPRWKRLKEEGNPDWELEKKKDEERKAKDPTVKIFDNLNKYGLLPLFPLFTNIQKDIEWLPLGKRQSVRKWDKDMFIQAIERLLSWESWNRRVADEYKQLKEKTESYYKEHLTGGEEWIEKIRKFEKERNMELEKNAFAPNDGYFITSRQIRGWDRVYEKWSKLPESASPEELWKVVAEQQNKMSEGFGDPKVFSFLANRENRDIWRGHSERIYHIAAYNGLQKKLSRTKEQATFTLPDAIEHPLWIRYESPGGTNLNLFKLEEKQKKNYYVTLSKIIWPSEEKWIEKENIEIPLAPSIQFNRQIKLKQHVKGKQEISFSDYSSRISLDGVLGGSRIQFNRKYIKNHKELLGEGDIGPVFFNLVVDVAPLQETRNGRLQSPIGKALKVISSDFSKVIDYKPKELMDWMNTGSASNSFGVASLLEGMRVMSIDMGQRTSASVSIFEVVKELPKDQEQKLFYSINDTELFAIHKRSFLLNLPGEVVTKNNKQQRQERRKKRQFVRSQIRMLANVLRLETKKTPDERKKAIHKLMEIVQSYDSWTASQKEVWEKELNLLTNMAAFNDEIWKESLVELHHRIEPYVGQIVSKWRKGLSEGRKNLAGISMWNIDELEDTRRLLISWSKRSRTPGEANRIETDEPFGSSLLQHIQNVKDDRLKQMANLIIMTALGFKYDKEEKDRYKRWKETYPACQIILFENLNRYLFNLDRSRRENSRLMKWAHRSIPRTVSMQGEMFGLQVGDVRSEYSSRFHAKTGAPGIRCHALTEEDLKAGSNTLKRLIEDGFINESELAYLKKGDIIPSQGGELFVTLSKRYKKDSDNNELTVIHADINAAQNLQKRFWQQNSEVYRVPCQLARMGEDKLYIPKSQTETIKKYFGKGSFVKNNTEQEVYKWEKSEKMKIKTDTTFDLQDLDGFEDISKTIELAQEQQKKYLTMFRDPSGYFFNNETWRPQKEYWSIVNNIIKSCLKKKILSNKVEL

SEQ ID NO: 258 - DNA, 47 bp, synthetic construct
  misc_feature 1..47: note = 5'UTR oligonucleotide sequence
  source 1..47: mol_type = other DNA
gggaaataagagagaaaagaagagtaagaagaaatataagagccacc

SEQ ID NO: 259 - DNA, 101 bp, synthetic construct
  misc_feature 1..101: note = 3'UTR (TriLink standard UTR)polynucleotide sequence
  source 1..101: mol_type = other DNA
gctggagcctcggtggccatgcttcttgccccttgggcctccccccagcccctcctccccttcctgcacccgtacccccgtggtctttgaataaagtctga

SEQ ID NO: 260 - DNA, 3420 bp, Bacillus hisashii
  misc_feature 1..3420: note = bhCas12b (V4) polynucleotide sequence
  source 1..3420: mol_type = genomic DNA
atggccccaaagaagaagcggaaggtcggtatccacggagtcccagcagccgccaccagatccttcatcctgaagatcgagcccaacgaggaagtgaagaaaggcctctggaaaacccacgaggtgctgaaccacggaatcgcctactacatgaatatcctgaagctgatccggcaagaggccatctacgagcaccacgagcaggaccccaagaatcccaagaaggtgtccaaggccgagatccaggccgagctgtgggatttcgtgctgaagatgcagaagtgcaacagcttcacacacgaggtggacaaggacgaggtgttcaacatcctgagagagctgtacgaggaactggtgcccagcagcgtggaaaagaagggcgaagccaaccagctgagcaacaagtttctgtaccctctggtggaccccaacagccagtctggaaagggaacagccagcagcggcagaaagcccagatggtacaacctgaagattgccggcgatccctcctgggaagaagagaagaagaagtgggaagaagataagaaaaaggacccgctggccaagatcctgggcaagctggctgagtacggactgatccctctgttcatcccctacaccgacagcaacgagcccatcgtgaaagaaatcaagtggatggaaaagtcccggaaccagagcgtgcggcggctggataaggacatgttcattcaggccctggaacggttcctgagctgggagagctggaacctgaaagtgaaagaggaatacgagaaggtcgagaaagagtacaagaccctggaagagaggatcaaagaggacatccaggctctgaaggctctggaacagtatgagaaagagcggcaagaacagctgctgcgggacaccctgaacaccaacgagtaccggctgagcaagagaggccttagaggctggcgggaaatcatccagaaatggctgaaaatggacgagaacgagccctccgagaagtacctggaagtgttcaaggactaccagcggaagcaccctagagaggccggcgattacagcgtgtacgagttcctgtccaagaaagagaaccacttcatctggcggaatcaccctgagtacccctacctgtacgccaccttctgcgagatcgacaagaaaaagaaggacgccaagcagcaggccaccttcacactggccgatcctatcaatcaccctctgtgggtccgattcgaggaaagaagcggcagcaacctgaacaagtacagaatcctgaccgagcagctgcacaccgagaagctgaagaaaaagctgacagtgcagctggaccggctgatctaccctacagaatctggcggctgggaagagaagggcaaagtggacattgtgctgctgcccagccggcagttctacaaccagatcttcctggacatcgaggaaaagggcaagcacgccttcacctacaaggatgagagcatcaagttccctctgaagggcacactcggcggagccagagtgcagttcgacagagatcacctgagaagataccctcacaaggtggaaagcggcaacgtgggcagaatctacttcaacatgaccgtgaacatcgagcctacagagtccccagtgtccaagtctctgaagatccaccgggacgacttccccaaggtggtcaacttcaagcccaaagaactgaccgagtggatcaaggacagcaagggcaagaaactgaagtccggcatcgagtccctggaaatcggcctgagagtgatgagcatcgacctgggacagagacaggccgctgccgcctctattttcgaggtggtggatcagaagcccgacatcgaaggcaagctgtttttcccaatcaagggcaccgagctgtatgccgtgcacagagccagcttcaacatcaagctgcccggcgagacactggtcaagagcagagaagtgctgcggaaggccagagaggacaatctgaaactgatgaaccagaagctcaacttcctgcggaacgtgctgcacttccagcagttcgaggacatcaccgagagagagaagcgggtcaccaagtggatcagcagacaagagaacagcgacgtgcccctggtgtaccaggatgagctgatccagatccgcgagctgatgtacaagccttacaaggactgggtcgccttcctgaagcagctccacaagagactggaagtcgagatcggcaaagaagtgaagcactggcggaagtccctgagcgacggaagaaagggcctgtacggcatctccctgaagaacatcgacgagatcgatcggacccggaagttcctgctgagatggtccctgaggcctaccgaacctggcgaagtgcgtagactggaacccggccagagattcgccatcgaccagctgaatcacctgaacgccctgaaagaagatcggctgaagaagatggccaacaccatcatcatgcacgccctgggctactgctacgacgtgcggaagaagaaatggcaggctaagaaccccgcctgccagatcatcctgttcgaggatctgagcaactacaacccctacgaggaaaggtcccgcttcgagaacagcaagctcatgaagtggtccagacgcgagatccccagacaggttgcactgcagggcgagatctatggcctgcaagtgggagaagtgggcgctcagttcagcagcagattccacgccaagacaggcagccctggcatcagatgtagcgtcgtgaccaaagagaagctgcaggacaatcggttcttcaagaatctgcagagagagggcagactgaccctggacaaaatcgccgtgctgaaagagggcgatctgtacccagacaaaggcggcgagaagttcatcagcctgagcaaggatcggaagtgcgtgaccacacacgccgacatcaacgccgctcagaacctgcagaagcggttctggacaagaacccacggcttctacaaggtgtactgcaaggcctaccaggtggacggccagaccgtgtacatccctgagagcaaggaccagaagcagaagatcatcgaagagttcggcgagggctacttcattctgaaggacggggtgtacgaatgggtcaacgccggcaagctgaaaatcaagaagggcagctccaagcagagcagcagcgagctggtggatagcgacatcctgaaagacagcttcgacctggcctccgagctgaaaggcgaaaagctgatgctgtacagggaccccagcggcaatgtgttccccagcgacaaatggatggccgctggcgtgttcttcggaaagctggaacgcatcctgatcagcaagctgaccaaccagtactccatcagcaccatcgaggacgacagcagcaagcagtctatgaaaaggccggcggccacgaaaaaggccggccaggcaaaaaagaaaaag

SEQ ID NO: 261 - protein, 17 aa, synthetic construct
  REGION 1..17: note = synthetic peptide sequence
MAPKKKRKVGIHGVPAA

SEQ ID NO: 262 - DNA, 51 bp, synthetic construct
  misc_feature 1..51: note = synthetic oligonucleotide sequence
  source 1..51: mol_type = other DNA
atggccccaaagaagaagcggaaggtcggtatccacggagtcccagcagcc

SEQ ID NO: 263 - protein, 1554 aa, synthetic construct
  REGION 1..1554: note = 101 Cas9 TadAins 1015 polypeptide sequence
MDKKYSIGLAIGTNSVGWAVITDEYKVPSKKFKVLGNTDRHSIKKNLIGALLFDSGETAEATRLKRTARRRYTRRKNRICYLQEIFSNEMAKVDDSFFHRLEESFLVEEDKKHERHPIFGNIVDEVAYHEKYPTIYHLRKKLVDSTDKADLRLIYLALAHMIKFRGHFLIEGDLNPDNSDVDKLFIQLVQTYNQLFEENPINASGVDAKAILSARLSKSRRLENLIAQLPGEKKNGLFGNLIALSLGLTPNFKSNFDLAEDAKLQLSKDTYDDDLDNLLAQIGDQYADLFLAAKNLSDAILLSDILRVNTEITKAPLSASMIKRYDEHHQDLTLLKALVRQQLPEKYKEIFFDQSKNGYAGYIDGGASQEEFYKFIKPILEKMDGTEELLVKLNREDLLRKQRTFDNGSIPHQIHLGELHAILRRQEDFYPFLKDNREKIEKILTFRIPYYVGPLARGNSRFAWMTRKSEETITPWNFEEVVDKGASAQSFIERMTNFDKNLPNEKVLPKHSLLYEYFTVYNELTKVKYVTEGMRKPAFLSGEQKKAIVDLLFKTNRKVTVKQLKEDYFKKIECFDSVEISGVEDRFNASLGTYHDLLKIIKDKDFLDNEENEDILEDIVLTLTLFEDREMIEERLKTYAHLFDDKVMKQLKRRRYTGWGRLSRKLINGIRDKQSGKTILDFLKSDGFANRNFMQLIHDDSLTFKEDIQKAQVSGQGDSLHEHIANLAGSPAIKKGILQTVKVVDELVKVMGRHKPENIVIEMARENQTTQKGQKNSRERMKRIEEGIKELGSQILKEHPVENTQLQNEKLYLYYLQNGRDMYVDQELDINRLSDYDVDHIVPQSFLKDDSIDNKVLTRSDKNRGKSDNVPSEEVVKKMKNYWRQLLNAKLITQRKFDNLTKAERGGLSELDKAGFIKRQLVETRQITKHVAQILDSRMNTKYDENDKLIREVKVITLKSKLVSDFRKDFQFYKVREINNYHHAHDAYLNAVVGTALIKKYPKLESEFVYGDYKVGSSGSETPGTSESATPESSGSEVEFSHEYWMRHALTLAKRARDEREVPVGAVLVLNNRVIGEGWNRAIGLHDPTAHAEIMALRQGGLVMQNYRLIDATLYVTFEPCVMCAGAMIHSRIGRVVFGVRNAKTGAAGSLMDVLHYPGMNHRVEITEGILADECAALLCYFFRMPRQVFNAQKKAQSSTDYDVRKMIAKSEQEIGKATAKYFFYSNIMNFFKTEITLANGEIRKRPLIETNGETGEIVWDKGRDFATVRKVLSMPQVNIVKKTEVQTGGFSKESILPKRNSDKLIARKKDWDPKKYGGFDSPTVAYSVLVVAKVEKGKSKKLKSVKELLGITIMERSSFEKNPIDFLEAKGYKEVKKDLIIKLPKYSLFELENGRKRMLASAGELQKGNELALPSKYVNFLYLASHYEKLKGSPEDNEQKQLFVEQHKHYLDEIIEQISEFSKRVILADANLDKVLSAYNKHRDKPIREQAENIIHLFTLTNLGAPAAFKYFDTTIDRKRYTSTKEVLDATLIHQSITGLYETRIDLSQLGGD

SEQ ID NO: 264 - protein, 1554 aa, synthetic construct
  REGION 1..1554: note = 102 Cas9 TadAins 1022 polypeptide sequence
MDKKYSIGLAIGTNSVGWAVITDEYKVPSKKFKVLGNTDRHSIKKNLIGALLFDSGETAEATRLKRTARRRYTRRKNRICYLQEIFSNEMAKVDDSFFHRLEESFLVEEDKKHERHPIFGNIVDEVAYHEKYPTIYHLRKKLVDSTDKADLRLIYLALAHMIKFRGHFLIEGDLNPDNSDVDKLFIQLVQTYNQLFEENPINASGVDAKAILSARLSKSRRLENLIAQLPGEKKNGLFGNLIALSLGLTPNFKSNFDLAEDAKLQLSKDTYDDDLDNLLAQIGDQYADLFLAAKNLSDAILLSDILRVNTEITKAPLSASMIKRYDEHHQDLTLLKALVRQQLPEKYKEIFFDQSKNGYAGYIDGGASQEEFYKFIKPILEKMDGTEELLVKLNREDLLRKQRTFDNGSIPHQIHLGELHAILRRQEDFYPFLKDNREKIEKILTFRIPYYVGPLARGNSRFAWMTRKSEETITPWNFEEVVDKGASAQSFIERMTNFDKNLPNEKVLPKHSLLYEYFTVYNELTKVKYVTEGMRKPAFLSGEQKKAIVDLLFKTNRKVTVKQLKEDYFKKIECFDSVEISGVEDRFNASLGTYHDLLKIIKDKDFLDNEENEDILEDIVLTLTLFEDREMIEERLKTYAHLFDDKVMKQLKRRRYTGWGRLSRKLINGIRDKQSGKTILDFLKSDGFANRNFMQLIHDDSLTFKEDIQKAQVSGQGDSLHEHIANLAGSPAIKKGILQTVKVVDELVKVMGRHKPENIVIEMARENQTTQKGQKNSRERMKRIEEGIKELGSQILKEHPVENTQLQNEKLYLYYLQNGRDMYVDQELDINRLSDYDVDHIVPQSFLKDDSIDNKVLTRSDKNRGKSDNVPSEEVVKKMKNYWRQLLNAKLITQRKFDNLTKAERGGLSELDKAGFIKRQLVETRQITKHVAQILDSRMNTKYDENDKLIREVKVITLKSKLVSDFRKDFQFYKVREINNYHHAHDAYLNAVVGTALIKKYPKLESEFVYGDYKVYDVRKMIGSSGSETPGTSESATPESSGSEVEFSHEYWMRHALTLAKRARDEREVPVGAVLVLNNRVIGEGWNRAIGLHDPTAHAEIMALRQGGLVMQNYRLIDATLYVTFEPCVMCAGAMIHSRIGRVVFGVRNAKTGAAGSLMDVLHYPGMNHRVEITEGILADECAALLCYFFRMPRQVFNAQKKAQSSTDAKSEQEIGKATAKYFFYSNIMNFFKTEITLANGEIRKRPLIETNGETGEIVWDKGRDFATVRKVLSMPQVNIVKKTEVQTGGFSKESILPKRNSDKLIARKKDWDPKKYGGFDSPTVAYSVLVVAKVEKGKSKKLKSVKELLGITIMERSSFEKNPIDFLEAKGYKEVKKDLIIKLPKYSLFELENGRKRMLASAGELQKGNELALPSKYVNFLYLASHYEKLKGSPEDNEQKQLFVEQHKHYLDEIIEQISEFSKRVILADANLDKVLSAYNKHRDKPIREQAENIIHLFTLTNLGAPAAFKYFDTTIDRKRYTSTKEVLDATLIHQSITGLYETRIDLSQLGGD

SEQ ID NO: 265 - protein, 1554 aa, synthetic construct
  REGION 1..1554: note = 103 Cas9 TadAins 1029 polypeptide sequence
MDKKYSIGLAIGTNSVGWAVITDEYKVPSKKFKVLGNTDRHSIKKNLIGALLFDSGETAEATRLKRTARRRYTRRKNRICYLQEIFSNEMAKVDDSFFHRLEESFLVEEDKKHERHPIFGNIVDEVAYHEKYPTIYHLRKKLVDSTDKADLRLIYLALAHMIKFRGHFLIEGDLNPDNSDVDKLFIQLVQTYNQLFEENPINASGVDAKAILSARLSKSRRLENLIAQLPGEKKNGLFGNLIALSLGLTPNFKSNFDLAEDAKLQLSKDTYDDDLDNLLAQIGDQYADLFLAAKNLSDAILLSDILRVNTEITKAPLSASMIKRYDEHHQDLTLLKALVRQQLPEKYKEIFFDQSKNGYAGYIDGGASQEEFYKFIKPILEKMDGTEELLVKLNREDLLRKQRTFDNGSIPHQIHLGELHAILRRQEDFYPFLKDNREKIEKILTFRIPYYVGPLARGNSRFAWMTRKSEETITPWNFEEVVDKGASAQSFIERMTNFDKNLPNEKVLPKHSLLYEYFTVYNELTKVKYVTEGMRKPAFLSGEQKKAIVDLLFKTNRKVTVKQLKEDYFKKIECFDSVEISGVEDRFNASLGTYHDLLKIIKDKDFLDNEENEDILEDIVLTLTLFEDREMIEERLKTYAHLFDDKVMKQLKRRRYTGWGRLSRKLINGIRDKQSGKTILDFLKSDGFANRNFMQLIHDDSLTFKEDIQKAQVSGQGDSLHEHIANLAGSPAIKKGILQTVKVVDELVKVMGRHKPENIVIEMARENQTTQKGQKNSRERMKRIEEGIKELGSQILKEHPVENTQLQNEKLYLYYLQNGRDMYVDQELDINRLSDYDVDHIVPQSFLKDDSIDNKVLTRSDKNRGKSDNVPSEEVVKKMKNYWRQLLNAKLITQRKFDNLTKAERGGLSELDKAGFIKRQLVETRQITKHVAQILDSRMNTKYDENDKLIREVKVITLKSKLVSDFRKDFQFYKVREINNYHHAHDAYLNAVVGTALIKKYPKLESEFVYGDYKVYDVRKMIAKSEQEIGSSGSETPGTSESATPESSGSEVEFSHEYWMRHALTLAKRARDEREVPVGAVLVLNNRVIGEGWNRAIGLHDPTAHAEIMALRQGGLVMQNYRLIDATLYVTFEPCVMCAGAMIHSRIGRVVFGVRNAKTGAAGSLMDVLHYPGMNHRVEITEGILADECAALLCYFFRMPRQVFNAQKKAQSSTDGKATAKYFFYSNIMNFFKTEITLANGEIRKRPLIETNGETGEIVWDKGRDFATVRKVLSMPQVNIVKKTEVQTGGFSKESILPKRNSDKLIARKKDWDPKKYGGFDSPTVAYSVLVVAKVEKGKSKKLKSVKELLGITIMERSSFEKNPIDFLEAKGYKEVKKDLIIKLPKYSLFELENGRKRMLASAGELQKGNELALPSKYVNFLYLASHYEKLKGSPEDNEQKQLFVEQHKHYLDEIIEQISEFSKRVILADANLDKVLSAYNKHRDKPIREQAENIIHLFTLTNLGAPAAFKYFDTTIDRKRYTSTKEVLDATLIHQSITGLYETRIDLSQLGGD

SEQ ID NO: 266 - protein, 1554 aa, synthetic construct
  REGION 1..1554: note = 103 Cas9 TadAins 1040 polypeptide sequence
MDKKYSIGLAIGTNSVGWAVITDEYKVPSKKFKVLGNTDRHSIKKNLIGALLFDSGETAEATRLKRTARRRYTRRKNRICYLQEIFSNEMAKVDDSFFHRLEESFLVEEDKKHERHPIFGNIVDEVAYHEKYPTIYHLRKKLVDSTDKADLRLIYLALAHMIKFRGHFLIEGDLNPDNSDVDKLFIQLVQTYNQLFEENPINASGVDAKAILSARLSKSRRLENLIAQLPGEKKNGLFGNLIALSLGLTPNFKSNFDLAEDAKLQLSKDTYDDDLDNLLAQIGDQYADLFLAAKNLSDAILLSDILRVNTEITKAPLSASMIKRYDEHHQDLTLLKALVRQQLPEKYKEIFFDQSKNGYAGYIDGGASQEEFYKFIKPILEKMDGTEELLVKLNREDLLRKQRTFDNGSIPHQIHLGELHAILRRQEDFYPFLKDNREKIEKILTFRIPYYVGPLARGNSRFAWMTRKSEETITPWNFEEVVDKGASAQSFIERMTNFDKNLPNEKVLPKHSLLYEYFTVYNELTKVKYVTEGMRKPAFLSGEQKKAIVDLLFKTNRKVTVKQLKEDYFKKIECFDSVEISGVEDRFNASLGTYHDLLKIIKDKDFLDNEENEDILEDIVLTLTLFEDREMIEERLKTYAHLFDDKVMKQLKRRRYTGWGRLSRKLINGIRDKQSGKTILDFLKSDGFANRNFMQLIHDDSLTFKEDIQKAQVSGQGDSLHEHIANLAGSPAIKKGILQTVKVVDELVKVMGRHKPENIVIEMARENQTTQKGQKNSRERMKRIEEGIKELGSQILKEHPVENTQLQNEKLYLYYLQNGRDMYVDQELDINRLSDYDVDHIVPQSFLKDDSIDNKVLTRSDKNRGKSDNVPSEEVVKKMKNYWRQLLNAKLITQRKFDNLTKAERGGLSELDKAGFIKRQLVETRQITKHVAQILDSRMNTKYDENDKLIREVKVITLKSKLVSDFRKDFQFYKVREINNYHHAHDAYLNAVVGTALIKKYPKLESEFVYGDYKVYDVRKMIAKSEQEIGKATAKYFFYSGSSGSETPGTSESATPESSGSEVEFSHEYWMRHALTLAKRARDEREVPVGAVLVLNNRVIGEGWNRAIGLHDPTAHAEIMALRQGGLVMQNYRLIDATLYVTFEPCVMCAGAMIHSRIGRVVFGVRNAKTGAAGSLMDVLHYPGMNHRVEITEGILADECAALLCYFFRMPRQVFNAQKKAQSSTDNIMNFFKTEITLANGEIRKRPLIETNGETGEIVWDKGRDFATVRKVLSMPQVNIVKKTEVQTGGFSKESILPKRNSDKLIARKKDWDPKKYGGFDSPTVAYSVLVVAKVEKGKSKKLKSVKELLGITIMERSSFEKNPIDFLEAKGYKEVKKDLIIKLPKYSLFELENGRKRMLASAGELQKGNELALPSKYVNFLYLASHYEKLKGSPEDNEQKQLFVEQHKHYLDEIIEQISEFSKRVILADANLDKVLSAYNKHRDKPIREQAENIIHLFTLTNLGAPAAFKYFDTTIDRKRYTSTKEVLDATLIHQSITGLYETRIDLSQLGGD

SEQ ID NO: 267 - protein, 1554 aa, synthetic construct
  REGION 1..1554: note = 105 Cas9 TadAins 1068 polypeptide sequence
MDKKYSIGLAIGTNSVGWAVITDEYKVPSKKFKVLGNTDRHSIKKNLIGALLFDSGETAEATRLKRTARRRYTRRKNRICYLQEIFSNEMAKVDDSFFHRLEESFLVEEDKKHERHPIFGNIVDEVAYHEKYPTIYHLRKKLVDSTDKADLRLIYLALAHMIKFRGHFLIEGDLNPDNSDVDKLFIQLVQTYNQLFEENPINASGVDAKAILSARLSKSRRLENLIAQLPGEKKNGLFGNLIALSLGLTPNFKSNFDLAEDAKLQLSKDTYDDDLDNLLAQIGDQYADLFLAAKNLSDAILLSDILRVNTEITKAPLSASMIKRYDEHHQDLTLLKALVRQQLPEKYKEIFFDQSKNGYAGYIDGGASQEEFYKFIKPILEKMDGTEELLVKLNREDLLRKQRTFDNGSIPHQIHLGELHAILRRQEDFYPFLKDNREKIEKILTFRIPYYVGPLARGNSRFAWMTRKSEETITPWNFEEVVDKGASAQSFIERMTNFDKNLPNEKVLPKHSLLYEYFTVYNELTKVKYVTEGMRKPAFLSGEQKKAIVDLLFKTNRKVTVKQLKEDYFKKIECFDSVEISGVEDRFNASLGTYHDLLKIIKDKDFLDNEENEDILEDIVLTLTLFEDREMIEERLKTYAHLFDDKVMKQLKRRRYTGWGRLSRKLINGIRDKQSGKTILDFLKSDGFANRNFMQLIHDDSLTFKEDIQKAQVSGQGDSLHEHIANLAGSPAIKKGILQTVKVVDELVKVMGRHKPENIVIEMARENQTTQKGQKNSRERMKRIEEGIKELGSQILKEHPVENTQLQNEKLYLYYLQNGRDMYVDQELDINRLSDYDVDHIVPQSFLKDDSIDNKVLTRSDKNRGKSDNVPSEEVVKKMKNYWRQLLNAKLITQRKFDNLTKAERGGLSELDKAGFIKRQLVETRQITKHVAQILDSRMNTKYDENDKLIREVKVITLKSKLVSDFRKDFQFYKVREINNYHHAHDAYLNAVVGTALIKKYPKLESEFVYGDYKVYDVRKMIAKSEQEIGKATAKYFFYSNIMNFFKTEITLANGEIRKRPLIETNGEGSSGSETPGTSESATPESSGSEVEFSHEYWMRHALTLAKRARDEREVPVGAVLVLNNRVIGEGWNRAIGLHDPTAHAEIMALRQGGLVMQNYRLIDATLYVTFEPCVMCAGAMIHSRIGRVVFGVRNAKTGAAGSLMDVLHYPGMNHRVEITEGILADECAALLCYFFRMPRQVFNAQKKAQSSTDTGEIVWDKGRDFATVRKVLSMPQVNIVKKTEVQTGGFSKESILPKRNSDKLIARKKDWDPKKYGGFDSPTVAYSVLVVAKVEKGKSKKLKSVKELLGITIMERSSFEKNPIDFLEAKGYKEVKKDLIIKLPKYSLFELENGRKRMLASAGELQKGNELALPSKYVNFLYLASHYEKLKGSPEDNEQKQLFVEQHKHYLDEIIEQISEFSKRVILADANLDKVLSAYNKHRDKPIREQAENIIHLFTLTNLGAPAAFKYFDTTIDRKRYTSTKEVLDATLIHQSITGLYETRIDLSQLGGD

SEQ ID NO: 268 - protein, 1554 aa, synthetic construct
  REGION 1..1554: note = 106 Cas9 TadAins 1247 polypeptide sequence
MDKKYSIGLAIGTNSVGWAVITDEYKVPSKKFKVLGNTDRHSIKKNLIGALLFDSGETAEATRLKRTARRRYTRRKNRICYLQEIFSNEMAKVDDSFFHRLEESFLVEEDKKHERHPIFGNIVDEVAYHEKYPTIYHLRKKLVDSTDKADLRLIYLALAHMIKFRGHFLIEGDLNPDNSDVDKLFIQLVQTYNQLFEENPINASGVDAKAILSARLSKSRRLENLIAQLPGEKKNGLFGNLIALSLGLTPNFKSNFDLAEDAKLQLSKDTYDDDLDNLLAQIGDQYADLFLAAKNLSDAILLSDILRVNTEITKAPLSASMIKRYDEHHQDLTLLKALVRQQLPEKYKEIFFDQSKNGYAGYIDGGASQEEFYKFIKPILEKMDGTEELLVKLNREDLLRKQRTFDNGSIPHQIHLGELHAILRRQEDFYPFLKDNREKIEKILTFRIPYYVGPLARGNSRFAWMTRKSEETITPWNFEEVVDKGASAQSFIERMTNFDKNLPNEKVLPKHSLLYEYFTVYNELTKVKYVTEGMRKPAFLSGEQKKAIVDLLFKTNRKVTVKQLKEDYFKKIECFDSVEISGVEDRFNASLGTYHDLLKIIKDKDFLDNEENEDILEDIVLTLTLFEDREMIEERLKTYAHLFDDKVMKQLKRRRYTGWGRLSRKLINGIRDKQSGKTILDFLKSDGFANRNFMQLIHDDSLTFKEDIQKAQVSGQGDSLHEHIANLAGSPAIKKGILQTVKVVDELVKVMGRHKPENIVIEMARENQTTQKGQKNSRERMKRIEEGIKELGSQILKEHPVENTQLQNEKLYLYYLQNGRDMYVDQELDINRLSDYDVDHIVPQSFLKDDSIDNKVLTRSDKNRGKSDNVPSEEVVKKMKNYWRQLLNAKLITQRKFDNLTKAERGGLSELDKAGFIKRQLVETRQITKHVAQILDSRMNTKYDENDKLIREVKVITLKSKLVSDFRKDFQFYKVREINNYHHAHDAYLNAVVGTALIKKYPKLESEFVYGDYKVYDVRKMIAKSEQEIGKATAKYFFYSNIMNFFKTEITLANGEIRKRPLIETNGETGEIVWDKGRDFATVRKVLSMPQVNIVKKTEVQTGGFSKESILPKRNSDKLIARKKDWDPKKYGGFDSPTVAYSVLVVAKVEKGKSKKLKSVKELLGITIMERSSFEKNPIDFLEAKGYKEVKKDLIIKLPKYSLFELENGRKRMLASAGELQKGNELALPSKYVNFLYLASHYEKLKGGSSGSETPGTSESATPESSGSEVEFSHEYWMRHALTLAKRARDEREVPVGAVLVLNNRVIGEGWNRAIGLHDPTAHAEIMALRQGGLVMQNYRLIDATLYVTFEPCVMCAGAMIHSRIGRVVFGVRNAKTGAAGSLMDVLHYPGMNHRVEITEGILADECAALLCYFFRMPRQVFNAQKKAQSSTDSPEDNEQKQLFVEQHKHYLDEIIEQISEFSKRVILADANLDKVLSAYNKHRDKPIREQAENIIHLFTLTNLGAPAAFKYFDTTIDRKRYTSTKEVLDATLIHQSITGLYETRIDLSQLGGD

SEQ ID NO: 269 - protein, 1554 aa, synthetic construct
  REGION 1..1554: note = 107 Cas9 TadAins 1054 polypeptide sequence
MDKKYSIGLAIGTNSVGWAVITDEYKVPSKKFKVLGNTDRHSIKKNLIGALLFDSGETAEATRLKRTARRRYTRRKNRICYLQEIFSNEMAKVDDSFFHRLEESFLVEEDKKHERHPIFGNIVDEVAYHEKYPTIYHLRKKLVDSTDKADLRLIYLALAHMIKFRGHFLIEGDLNPDNSDVDKLFIQLVQTYNQLFEENPINASGVDAKAILSARLSKSRRLENLIAQLPGEKKNGLFGNLIALSLGLTPNFKSNFDLAEDAKLQLSKDTYDDDLDNLLAQIGDQYADLFLAAKNLSDAILLSDILRVNTEITKAPLSASMIKRYDEHHQDLTLLKALVRQQLPEKYKEIFFDQSKNGYAGYIDGGASQEEFYKFIKPILEKMDGTEELLVKLNREDLLRKQRTFDNGSIPHQIHLGELHAILRRQEDFYPFLKDNREKIEKILTFRIPYYVGPLARGNSRFAWMTRKSEETITPWNFEEVVDKGASAQSFIERMTNFDKNLPNEKVLPKHSLLYEYFTVYNELTKVKYVTEGMRKPAFLSGEQKKAIVDLLFKTNRKVTVKQLKEDYFKKIECFDSVEISGVEDRFNASLGTYHDLLKIIKDKDFLDNEENEDILEDIVLTLTLFEDREMIEERLKTYAHLFDDKVMKQLKRRRYTGWGRLSRKLINGIRDKQSGKTILDFLKSDGFANRNFMQLIHDDSLTFKEDIQKAQVSGQGDSLHEHIANLAGSPAIKKGILQTVKVVDELVKVMGRHKPENIVIEMARENQTTQKGQKNSRERMKRIEEGIKELGSQILKEHPVENTQLQNEKLYLYYLQNGRDMYVDQELDINRLSDYDVDHIVPQSFLKDDSIDNKVLTRSDKNRGKSDNVPSEEVVKKMKNYWRQLLNAKLITQRKFDNLTKAERGGLSELDKAGFIKRQLVETRQITKHVAQILDSRMNTKYDENDKLIREVKVITLKSKLVSDFRKDFQFYKVREINNYHHAHDAYLNAVVGTALIKKYPKLESEFVYGDYKVYDVRKMIAKSEQEIGKATAKYFFYSNIMNFFKTEITLANGSSGSETPGTSESATPESSGSEVEFSHEYWMRHALTLAKRARDEREVPVGAVLVLNNRVIGEGWNRAIGLHDPTAHAEIMALRQGGLVMQNYRLIDATLYVTFEPCVMCAGAMIHSRIGRVVFGVRNAKTGAAGSLMDVLHYPGMNHRVEITEGILADECAALLCYFFRMPRQVFNAQKKAQSSTDGEIRKRPLIETNGETGEIVWDKGRDFATVRKVLSMPQVNIVKKTEVQTGGFSKESILPKRNSDKLIARKKDWDPKKYGGFDSPTVAYSVLVVAKVEKGKSKKLKSVKELLGITIMERSSFEKNPIDFLEAKGYKEVKKDLIIKLPKYSLFELENGRKRMLASAGELQKGNELALPSKYVNFLYLASHYEKLKGSPEDNEQKQLFVEQHKHYLDEIIEQISEFSKRVILADANLDKVLSAYNKHRDKPIREQAENIIHLFTLTNLGAPAAFKYFDTTIDRKRYTSTKEVLDATLIHQSITGLYETRIDLSQLGGD

SEQ ID NO: 270 - protein, 1554 aa, synthetic construct
  REGION 1..1554: note = 108 Cas9 TadAins 1026 polypeptide sequence
MDKKYSIGLAIGTNSVGWAVITDEYKVPSKKFKVLGNTDRHSIKKNLIGALLFDSGETAEATRLKRTARRRYTRRKNRICYLQEIFSNEMAKVDDSFFHRLEESFLVEEDKKHERHPIFGNIVDEVAYHEKYPTIYHLRKKLVDSTDKADLRLIYLALAHMIKFRGHFLIEGDLNPDNSDVDKLFIQLVQTYNQLFEENPINASGVDAKAILSARLSKSRRLENLIAQLPGEKKNGLFGNLIALSLGLTPNFKSNFDLAEDAKLQLSKDTYDDDLDNLLAQIGDQYADLFLAAKNLSDAILLSDILRVNTEITKAPLSASMIKRYDEHHQDLTLLKALVRQQLPEKYKEIFFDQSKNGYAGYIDGGASQEEFYKFIKPILEKMDGTEELLVKLNREDLLRKQRTFDNGSIPHQIHLGELHAILRRQEDFYPFLKDNREKIEKILTFRIPYYVGPLARGNSRFAWMTRKSEETITPWNFEEVVDKGASAQSFIERMTNFDKNLPNEKVLPKHSLLYEYFTVYNELTKVKYVTEGMRKPAFLSGEQKKAIVDLLFKTNRKVTVKQLKEDYFKKIECFDSVEISGVEDRFNASLGTYHDLLKIIKDKDFLDNEENEDILEDIVLTLTLFEDREMIEERLKTYAHLFDDKVMKQLKRRRYTGWGRLSRKLINGIRDKQSGKTILDFLKSDGFANRNFMQLIHDDSLTFKEDIQKAQVSGQGDSLHEHIANLAGSPAIKKGILQTVKVVDELVKVMGRHKPENIVIEMARENQTTQKGQKNSRERMKRIEEGIKELGSQILKEHPVENTQLQNEKLYLYYLQNGRDMYVDQELDINRLSDYDVDHIVPQSFLKDDSIDNKVLTRSDKNRGKSDNVPSEEVVKKMKNYWRQLLNAKLITQRKFDNLTKAERGGLSELDKAGFIKRQLVETRQITKHVAQILDSRMNTKYDENDKLIREVKVITLKSKLVSDFRKDFQFYKVREINNYHHAHDAYLNAVVGTALIKKYPKLESEFVYGDYKVYDVRKMIAKSEGSSGSETPGTSESATPESSGSEVEFSHEYWMRHALTLAKRARDEREVPVGAVLVLNNRVIGEGWNRAIGLHDPTAHAEIMALRQGGLVMQNYRLIDATLYVTFEPCVMCAGAMIHSRIGRVVFGVRNAKTGAAGSLMDVLHYPGMNHRVEITEGILADECAALLCYFFRMPRQVFNAQKKAQSSTDQEIGKATAKYFFYSNIMNFFKTEITLANGEIRKRPLIETNGETGEIVWDKGRDFATVRKVLSMPQVNIVKKTEVQTGGFSKESILPKRNSDKLIARKKDWDPKKYGGFDSPTVAYSVLVVAKVEKGKSKKLKSVKELLGITIMERSSFEKNPIDFLEAKGYKEVKKDLIIKLPKYSLFELENGRKRMLASAGELQKGNELALPSKYVNFLYLASHYEKLKGSPEDNEQKQLFVEQHKHYLDEIIEQISEFSKRVILADANLDKVLSAYNKHRDKPIREQAENIIHLFTLTNLGAPAAFKYFDTTIDRKRYTSTKEVLDATLIHQSITGLYETRIDLSQLGGD

SEQ ID NO: 271 - protein, 1540 aa, synthetic construct
  REGION 1..1540: note = 109 Cas9 TadAins 768 polypeptide sequence
MDKKYSIGLAIGTNSVGWAVITDEYKVPSKKFKVLGNTDRHSIKKNLIGALLFDSGETAEATRLKRTARRRYTRRKNRICYLQEIFSNEMAKVDDSFFHRLEESFLVEEDKKHERHPIFGNIVDEVAYHEKYPTIYHLRKKLVDSTDKADLRLIYLALAHMIKFRGHFLIEGDLNPDNSDVDKLFIQLVQTYNQLFEENPINASGVDAKAILSARLSKSRRLENLIAQLPGEKKNGLFGNLIALSLGLTPNFKSNFDLAEDAKLQLSKDTYDDDLDNLLAQIGDQYADLFLAAKNLSDAILLSDILRVNTEITKAPLSASMIKRYDEHHQDLTLLKALVRQQLPEKYKEIFFDQSKNGYAGYIDGGASQEEFYKFIKPILEKMDGTEELLVKLNREDLLRKQRTFDNGSIPHQIHLGELHAILRRQEDFYPFLKDNREKIEKILTFRIPYYVGPLARGNSRFAWMTRKSEETITPWNFEEVVDKGASAQSFIERMTNFDKNLPNEKVLPKHSLLYEYFTVYNELTKVKYVTEGMRKPAFLSGEQKKAIVDLLFKTNRKVTVKQLKEDYFKKIECFDSVEISGVEDRFNASLGTYHDLLKIIKDKDFLDNEENEDILEDIVLTLTLFEDREMIEERLKTYAHLFDDKVMKQLKRRRYTGWGRLSRKLINGIRDKQSGKTILDFLKSDGFANRNFMQLIHDDSLTFKEDIQKAQVSGQGDSLHEHIANLAGSPAIKKGILQTVKVVDELVKVMGRHKPENIVIEMARENQGSSGSETPGTSESATPESSGSEVEFSHEYWMRHALTLAKRARDEREVPVGAVLVLNNRVIGEGWNRAIGLHDPTAHAEIMALRQGGLVMQNYRLIDATLYVTFEPCVMCAGAMIHSRIGRVVFGVRNAKTGAAGSLMDVLHYPGMNHRVEITEGILADECAALLCYFFRMPRTTQKGQKNSRERMKRIEEGIKELGSQILKEHPVENTQLQNEKLYLYYLQNGRDMYVDQELDINRLSDYDVDHIVPQSFLKDDSIDNKVLTRSDKNRGKSDNVPSEEVVKKMKNYWRQLLNAKLITQRKFDNLTKAERGGLSELDKAGFIKRQLVETRQITKHVAQILDSRMNTKYDENDKLIREVKVITLKSKLVSDFRKDFQFYKVREINNYHHAHDAYLNAVVGTALIKKYPKLESEFVYGDYKVYDVRKMIAKSEQEIGKATAKYFFYSNIMNFFKTEITLANGEIRKRPLIETNGETGEIVWDKGRDFATVRKVLSMPQVNIVKKTEVQTGGFSKESILPKRNSDKLIARKKDWDPKKYGGFDSPTVAYSVLVVAKVEKGKSKKLKSVKELLGITIMERSSFEKNPIDFLEAKGYKEVKKDLIIKLPKYSLFELENGRKRMLASAGELQKGNELALPSKYVNFLYLASHYEKLKGSPEDNEQKQLFVEQHKHYLDEIIEQISEFSKRVILADANLDKVLSAYNKHRDKPIREQAENIIHLFTLTNLGAPAAFKYFDTTIDRKRYTSTKEVLDATLIHQSITGLYETRIDLSQLGGD

SEQ ID NO: 272 - protein, 1540 aa, synthetic construct
  REGION 1..1540: note = 110.1 Cas9 TadAins 1250 polypeptide sequence
MDKKYSIGLAIGTNSVGWAVITDEYKVPSKKFKVLGNTDRHSIKKNLIGALLFDSGETAEATRLKRTARRRYTRRKNRICYLQEIFSNEMAKVDDSFFHRLEESFLVEEDKKHERHPIFGNIVDEVAYHEKYPTIYHLRKKLVDSTDKADLRLIYLALAHMIKFRGHFLIEGDLNPDNSDVDKLFIQLVQTYNQLFEENPINASGVDAKAILSARLSKSRRLENLIAQLPGEKKNGLFGNLIALSLGLTPNFKSNFDLAEDAKLQLSKDTYDDDLDNLLAQIGDQYADLFLAAKNLSDAILLSDILRVNTEITKAPLSASMIKRYDEHHQDLTLLKALVRQQLPEKYKEIFFDQSKNGYAGYIDGGASQEEFYKFIKPILEKMDGTEELLVKLNREDLLRKQRTFDNGSIPHQIHLGELHAILRRQEDFYPFLKDNREKIEKILTFRIPYYVGPLARGNSRFAWMTRKSEETITPWNFEEVVDKGASAQSFIERMTNFDKNLPNEKVLPKHSLLYEYFTVYNELTKVKYVTEGMRKPAFLSGEQKKAIVDLLFKTNRKVTVKQLKEDYFKKIECFDSVEISGVEDRFNASLGTYHDLLKIIKDKDFLDNEENEDILEDIVLTLTLFEDREMIEERLKTYAHLFDDKVMKQLKRRRYTGWGRLSRKLINGIRDKQSGKTILDFLKSDGFANRNFMQLIHDDSLTFKEDIQKAQVSGQGDSLHEHIANLAGSPAIKKGILQTVKVVDELVKVMGRHKPENIVIEMARENQTTQKGQKNSRERMKRIEEGIKELGSQILKEHPVENTQLQNEKLYLYYLQNGRDMYVDQELDINRLSDYDVDHIVPQSFLKDDSIDNKVLTRSDKNRGKSDNVPSEEVVKKMKNYWRQLLNAKLITQRKFDNLTKAERGGLSELDKAGFIKRQLVETRQITKHVAQILDSRMNTKYDENDKLIREVKVITLKSKLVSDFRKDFQFYKVREINNYHHAHDAYLNAVVGTALIKKYPKLESEFVYGDYKVYDVRKMIAKSEQEIGKATAKYFFYSNIMNFFKTEITLANGEIRKRPLIETNGETGEIVWDKGRDFATVRKVLSMPQVNIVKKTEVQTGGFSKESILPKRNSDKLIARKKDWDPKKYGGFDSPTVAYSVLVVAKVEKGKSKKLKSVKELLGITIMERSSFEKNPIDFLEAKGYKEVKKDLIIKLPKYSLFELENGRKRMLASAGELQKGNELALPSKYVNFLYLASHYEKLKGSPGSSGSETPGTSESATPESSGSEVEFSHEYWMRHALTLAKRARDEREVPVGAVLVLNNRVIGEGWNRAIGLHDPTAHAEIMALRQGGLVMQNYRLIDATLYVTFEPCVMCAGAMIHSRIGRVVFGVRNAKTGAAGSLMDVLHYPGMNHRVEITEGILADECAALLCYFFRMPREDNEQKQLFVEQHKHYLDEIIEQISEFSKRVILADANLDKVLSAYNKHRDKPIREQAENIIHLFTLTNLGAPAAFKYFDTTIDRKRYTSTKEVLDATLIHQSITGLYETRIDLSQLGGD

SEQ ID NO: 273 - protein, 1543 aa, synthetic construct
  REGION 1..1543: note = 110.2 Cas9 TadAins 1250 polypeptide sequence
MDKKYSIGLAIGTNSVGWAVITDEYKVPSKKFKVLGNTDRHSIKKNLIGALLFDSGETAEATRLKRTARRRYTRRKNRICYLQEIFSNEMAKVDDSFFHRLEESFLVEEDKKHERHPIFGNIVDEVAYHEKYPTIYHLRKKLVDSTDKADLRLIYLALAHMIKFRGHFLIEGDLNPDNSDVDKLFIQLVQTYNQLFEENPINASGVDAKAILSARLSKSRRLENLIAQLPGEKKNGLFGNLIALSLGLTPNFKSNFDLAEDAKLQLSKDTYDDDLDNLLAQIGDQYADLFLAAKNLSDAILLSDILRVNTEITKAPLSASMIKRYDEHHQDLTLLKALVRQQLPEKYKEIFFDQSKNGYAGYIDGGASQEEFYKFIKPILEKMDGTEELLVKLNREDLLRKQRTFDNGSIPHQIHLGELHAILRRQEDFYPFLKDNREKIEKILTFRIPYYVGPLARGNSRFAWMTRKSEETITPWNFEEVVDKGASAQSFIERMTNFDKNLPNEKVLPKHSLLYEYFTVYNELTKVKYVTEGMRKPAFLSGEQKKAIVDLLFKTNRKVTVKQLKEDYFKKIECFDSVEISGVEDRFNASLGTYHDLLKIIKDKDFLDNEENEDILEDIVLTLTLFEDREMIEERLKTYAHLFDDKVMKQLKRRRYTGWGRLSRKLINGIRDKQSGKTILDFLKSDGFANRNFMQLIHDDSLTFKEDIQKAQVSGQGDSLHEHIANLAGSPAIKKGILQTVKVVDELVKVMGRHKPENIVIEMARENQTTQKGQKNSRERMKRIEEGIKELGSQILKEHPVENTQLQNEKLYLYYLQNGRDMYVDQELDINRLSDYDVDHIVPQSFLKDDSIDNKVLTRSDKNRGKSDNVPSEEVVKKMKNYWRQLLNAKLITQRKFDNLTKAERGGLSELDKAGFIKRQLVETRQITKHVAQILDSRMNTKYDENDKLIREVKVITLKSKLVSDFRKDFQFYKVREINNYHHAHDAYLNAVVGTALIKKYPKLESEFVYGDYKVYDVRKMIAKSEQEIGKATAKYFFYSNIMNFFKTEITLANGEIRKRPLIETNGETGEIVWDKGRDFATVRKVLSMPQVNIVKKTEVQTGGFSKESILPKRNSDKLIARKKDWDPKKYGGFDSPTVAYSVLVVAKVEKGKSKKLKSVKELLGITIMERSSFEKNPIDFLEAKGYKEVKKDLIIKLPKYSLFELENGRKRMLASAGELQKGNELALPSKYVNFLYLASHYEKLKGSPGSSGSSGSETPGTSESATPESSGSEVEFSHEYWMRHALTLAKRARDEREVPVGAVLVLNNRVIGEGWNRAIGLHDPTAHAEIMALRQGGLVMQNYRLIDATLYVTFEPCVMCAGAMIHSRIGRVVFGVRNAKTGAAGSLMDVLHYPGMNHRVEITEGILADECAALLCYFFRMPREDNEQKQLFVEQHKHYLDEIIEQISEFSKRVILADANLDKVLSAYNKHRDKPIREQAENIIHLFTLTNLGAPAAFKYFDTTIDRKRYTSTKEVLDATLIHQSITGLYETRIDLSQLGGD

SEQ ID NO: 274 - protein, 1546 aa, synthetic construct
  REGION 1..1546: note = 110.3 Cas9 TadAins 1250 polypeptide sequence
MDKKYSIGLAIGTNSVGWAVITDEYKVPSKKFKVLGNTDRHSIKKNLIGALLFDSGETAEATRLKRTARRRYTRRKNRICYLQEIFSNEMAKVDDSFFHRLEESFLVEEDKKHERHPIFGNIVDEVAYHEKYPTIYHLRKKLVDSTDKADLRLIYLALAHMIKFRGHFLIEGDLNPDNSDVDKLFIQLVQTYNQLFEENPINASGVDAKAILSARLSKSRRLENLIAQLPGEKKNGLFGNLIALSLGLTPNFKSNFDLAEDAKLQLSKDTYDDDLDNLLAQIGDQYADLFLAAKNLSDAILLSDILRVNTEITKAPLSASMIKRYDEHHQDLTLLKALVRQQLPEKYKEIFFDQSKNGYAGYIDGGASQEEFYKFIKPILEKMDGTEELLVKLNREDLLRKQRTFDNGSIPHQIHLGELHAILRRQEDFYPFLKDNREKIEKILTFRIPYYVGPLARGNSRFAWMTRKSEETITPWNFEEVVDKGASAQSFIERMTNFDKNLPNEKVLPKHSLLYEYFTVYNELTKVKYVTEGMRKPAFLSGEQKKAIVDLLFKTNRKVTVKQLKEDYFKKIECFDSVEISGVEDRFNASLGTYHDLLKIIKDKDFLDNEENEDILEDIVLTLTLFEDREMIEERLKTYAHLFDDKVMKQLKRRRYTGWGRLSRKLINGIRDKQSGKTILDFLKSDGFANRNFMQLIHDDSLTFKEDIQKAQVSGQGDSLHEHIANLAGSPAIKKGILQTVKVVDELVKVMGRHKPENIVIEMARENQTTQKGQKNSRERMKRIEEGIKELGSQILKEHPVENTQLQNEKLYLYYLQNGRDMYVDQELDINRLSDYDVDHIVPQSFLKDDSIDNKVLTRSDKNRGKSDNVPSEEVVKKMKNYWRQLLNAKLITQRKFDNLTKAERGGLSELDKAGFIKRQLVETRQITKHVAQILDSRMNTKYDENDKLIREVKVITLKSKLVSDFRKDFQFYKVREINNYHHAHDAYLNAVVGTALIKKYPKLESEFVYGDYKVYDVRKMIAKSEQEIGKATAKYFFYSNIMNFFKTEITLANGEIRKRPLIETNGETGEIVWDKGRDFATVRKVLSMPQVNIVKKTEVQTGGFSKESILPKRNSDKLIARKKDWDPKKYGGFDSPTVAYSVLVVAKVEKGKSKKLKSVKELLGITIMERSSFEKNPIDFLEAKGYKEVKKDLIIKLPKYSLFELENGRKRMLASAGELQKGNELALPSKYVNFLYLASHYEKLKGSPGSSGSSGSETPGTSESATPESGSSSGSEVEFSHEYWMRHALTLAKRARDEREVPVGAVLVLNNRVIGEGWNRAIGLHDPTAHAEIMALRQGGLVMQNYRLIDATLYVTFEPCVMCAGAMIHSRIGRVVFGVRNAKTGAAGSLMDVLHYPGMNHRVEITEGILADECAALLCYFFRMPREDNEQKQLFVEQHKHYLDEIIEQISEFSKRVILADANLDKVLSAYNKHRDKPIREQAENIIHLFTLTNLGAPAAFKYFDTTIDRKRYTSTKEVLDATLIHQSITGLYETRIDLSQLGGD

SEQ ID NO: 275 - protein, 1546 aa, synthetic construct
  REGION 1..1546: note = 110.4 Cas9 TadAins 1250 polypeptide sequence
MDKKYSIGLAIGTNSVGWAVITDEYKVPSKKFKVLGNTDRHSIKKNLIGALLFDSGETAEATRLKRTARRRYTRRKNRICYLQEIFSNEMAKVDDSFFHRLEESFLVEEDKKHERHPIFGNIVDEVAYHEKYPTIYHLRKKLVDSTDKADLRLIYLALAHMIKFRGHFLIEGDLNPDNSDVDKLFIQLVQTYNQLFEENPINASGVDAKAILSARLSKSRRLENLIAQLPGEKKNGLFGNLIALSLGLTPNFKSNFDLAEDAKLQLSKDTYDDDLDNLLAQIGDQYADLFLAAKNLSDAILLSDILRVNTEITKAPLSASMIKRYDEHHQDLTLLKALVRQQLPEKYKEIFFDQSKNGYAGYIDGGASQEEFYKFIKPILEKMDGTEELLVKLNREDLLRKQRTFDNGSIPHQIHLGELHAILRRQEDFYPFLKDNREKIEKILTFRIPYYVGPLARGNSRFAWMTRKSEETITPWNFEEVVDKGASAQSFIERMTNFDKNLPNEKVLPKHSLLYEYFTVYNELTKVKYVTEGMRKPAFLSGEQKKAIVDLLFKTNRKVTVKQLKEDYFKKIECFDSVEISGVEDRFNASLGTYHDLLKIIKDKDFLDNEENEDILEDIVLTLTLFEDREMIEERLKTYAHLFDDKVMKQLKRRRYTGWGRLSRKLINGIRDKQSGKTILDFLKSDGFANRNFMQLIHDDSLTFKEDIQKAQVSGQGDSLHEHIANLAGSPAIKKGILQTVKVVDELVKVMGRHKPENIVIEMARENQTTQKGQKNSRERMKRIEEGIKELGSQILKEHPVENTQLQNEKLYLYYLQNGRDMYVDQELDINRLSDYDVDHIVPQSFLKDDSIDNKVLTRSDKNRGKSDNVPSEEVVKKMKNYWRQLLNAKLITQRKFDNLTKAERGGLSELDKAGFIKRQLVETRQITKHVAQILDSRMNTKYDENDKLIREVKVITLKSKLVSDFRKDFQFYKVREINNYHHAHDAYLNAVVGTALIKKYPKLESEFVYGDYKVYDVRKMIAKSEQEIGKATAKYFFYSNIMNFFKTEITLANGEIRKRPLIETNGETGEIVWDKGRDFATVRKVLSMPQVNIVKKTEVQTGGFSKESILPKRNSDKLIARKKDWDPKKYGGFDSPTVAYSVLVVAKVEKGKSKKLKSVKELLGITIMERSSFEKNPIDFLEAKGYKEVKKDLIIKLPKYSLFELENGRKRMLASAGELQKGNELALPSKYVNFLYLASHYEKLKGSPGSSGSSGSETPGTSESATPESGSSSGSEVEFSHEYWMRHALTLAKRARDEREVPVGAVLVLNNRVIGEGWNRAIGLHDPTAHAEIMALRQGGLVMQNYRLIDATLYVTFEPCVMCAGAMIHSRIGRVVFGVRNAKTGAAGSLMDVLHYPGMNHRVEITEGILADECAALLCYFFRMRREDNEQKQLFVEQHKHYLDEIIEQISEFSKRVILADANLDKVLSAYNKHRDKPIREQAENIIHLFTLTNLGAPAAFKYFDTTIDRKRYTSTKEVLDATLIHQSITGLYETRIDLSQLGGD

SEQ ID NO: 276 - protein, 1546 aa, synthetic construct
  REGION 1..1546: note = 110.5 Cas9 TadAins 1249 polypeptide sequence
MDKKYSIGLAIGTNSVGWAVITDEYKVPSKKFKVLGNTDRHSIKKNLIGALLFDSGETAEATRLKRTARRRYTRRKNRICYLQEIFSNEMAKVDDSFFHRLEESFLVEEDKKHERHPIFGNIVDEVAYHEKYPTIYHLRKKLVDSTDKADLRLIYLALAHMIKFRGHFLIEGDLNPDNSDVDKLFIQLVQTYNQLFEENPINASGVDAKAILSARLSKSRRLENLIAQLPGEKKNGLFGNLIALSLGLTPNFKSNFDLAEDAKLQLSKDTYDDDLDNLLAQIGDQYADLFLAAKNLSDAILLSDILRVNTEITKAPLSASMIKRYDEHHQDLTLLKALVRQQLPEKYKEIFFDQSKNGYAGYIDGGASQEEFYKFIKPILEKMDGTEELLVKLNREDLLRKQRTFDNGSIPHQIHLGELHAILRRQEDFYPFLKDNREKIEKILTFRIPYYVGPLARGNSRFAWMTRKSEETITPWNFEEVVDKGASAQSFIERMTNFDKNLPNEKVLPKHSLLYEYFTVYNELTKVKYVTEGMRKPAFLSGEQKKAIVDLLFKTNRKVTVKQLKEDYFKKIECFDSVEISGVEDRFNASLGTYHDLLKIIKDKDFLDNEENEDILEDIVLTLTLFEDREMIEERLKTYAHLFDDKVMKQLKRRRYTGWGRLSRKLINGIRDKQSGKTILDFLKSDGFANRNFMQLIHDDSLTFKEDIQKAQVSGQGDSLHEHIANLAGSPAIKKGILQTVKVVDELVKVMGRHKPENIVIEMARENQTTQKGQKNSRERMKRIEEGIKELGSQILKEHPVENTQLQNEKLYLYYLQNGRDMYVDQELDINRLSDYDVDHIVPQSFLKDDSIDNKVLTRSDKNRGKSDNVPSEEVVKKMKNYWRQLLNAKLITQRKFDNLTKAERGGLSELDKAGFIKRQLVETRQITKHVAQILDSRMNTKYDENDKLIREVKVITLKSKLVSDFRKDFQFYKVREINNYHHAHDAYLNAVVGTALIKKYPKLESEFVYGDYKVYDVRKMIAKSEQEIGKATAKYFFYSNIMNFFKTEITLANGEIRKRPLIETNGETGEIVWDKGRDFATVRKVLSMPQVNIVKKTEVQTGGFSKESILPKRNSDKLIARKKDWDPKKYGGFDSPTVAYSVLVVAKVEKGKSKKLKSVKELLGITIMERSSFEKNPIDFLEAKGYKEVKKDLIIKLPKYSLFELENGRKRMLASAGELQKGNELALPSKYVNFLYLASHYEKLKGSGSSGSSGSETPGTSESATPESGSSSGSEVEFSHEYWMRHALTLAKRARDEREVPVGAVLVLNNRVIGEGWNRAIGLHDPTAHAEIMALRQGGLVMQNYRLIDATLYVTFEPCVMCAGAMIHSRIGRVVFGVRNAKTGAAGSLMDVLHYPGMNHRVEITEGILADECAALLCYFFRMRRPEDNEQKQLFVEQHKHYLDEIIEQISEFSKRVILADANLDKVLSAYNKHRDKPIREQAENIIHLFTLTNLGAPAAFKYFDTTIDRKRYTSTKEVLDATLIHQSITGLYETRIDLSQLGGD

SEQ ID NO: 277 - protein, 1551 aa, synthetic construct
  REGION 1..1551: note = 110.5 Cas9 TadAins delta59-66 1250 polypeptide sequence
MDKKYSIGLAIGTNSVGWAVITDEYKVPSKKFKVLGNTDRHSIKKNLIGALLFDSGETAEATRLKRTARRRYTRRKNRICYLQEIFSNEMAKVDDSFFHRLEESFLVEEDKKHERHPIFGNIVDEVAYHEKYPTIYHLRKKLVDSTDKADLRLIYLALAHMIKFRGHFLIEGDLNPDNSDVDKLFIQLVQTYNQLFEENPINASGVDAKAILSARLSKSRRLENLIAQLPGEKKNGLFGNLIALSLGLTPNFKSNFDLAEDAKLQLSKDTYDDDLDNLLAQIGDQYADLFLAAKNLSDAILLSDILRVNTEITKAPLSASMIKRYDEHHQDLTLLKALVRQQLPEKYKEIFFDQSKNGYAGYIDGGASQEEFYKFIKPILEKMDGTEELLVKLNREDLLRKQRTFDNGSIPHQIHLGELHAILRRQEDFYPFLKDNREKIEKILTFRIPYYVGPLARGNSRFAWMTRKSEETITPWNFEEVVDKGASAQSFIERMTNFDKNLPNEKVLPKHSLLYEYFTVYNELTKVKYVTEGMRKPAFLSGEQKKAIVDLLFKTNRKVTVKQLKEDYFKKIECFDSVEISGVEDRFNASLGTYHDLLKIIKDKDFLDNEENEDILEDIVLTLTLFEDREMIEERLKTYAHLFDDKVMKQLKRRRYTGWGRLSRKLINGIRDKQSGKTILDFLKSDGFANRNFMQLIHDDSLTFKEDIQKAQVSGQGDSLHEHIANLAGSPAIKKGILQTVKVVDELVKVMGRHKPENIVIEMARENQTTQKGQKNSRERMKRIEEGIKELGSQILKEHPVENTQLQNEKLYLYYLQNGRDMYVDQELDINRLSDYDVDHIVPQSFLKDDSIDNKVLTRSDKNRGKSDNVPSEEVVKKMKNYWRQLLNAKLITQRKFDNLTKAERGGLSELDKAGFIKRQLVETRQITKHVAQILDSRMNTKYDENDKLIREVKVITLKSKLVSDFRKDFQFYKVREINNYHHAHDAYLNAVVGTALIKKYPKLESEFVYGDYKVYDVRKMIAKSEQEIGKATAKYFFYSNIMNFFKTEITLANGEIRKRPLIETNGETGEIVWDKGRDFATVRKVLSMPQVNIVKKTEVQTGGFSKESILPKRNSDKLIARKKDWDPKKYGGFDSPTVAYSVLVVAKVEKGKSKKLKSVKELLGITIMERSSFEKNPIDFLEAKGYKEVKKDLIIKLPKYSLFELENGRKRMLASAGELQKGNELALPSKYVNFLYLASHYEKLKGSPGSSGSSGSETPGTSESATPESGSSGSEVEFSHEYWMRHALTLAKRARDEREVPVGAVLVLNNRVIGEGWNRAHAEIMALRQGGLVMQNYRLIDATLYVTFEPCVMCAGAMIHSRIGRVVFGVRNAKTGAAGSLMDVLHYPGMNHRVEITEGILADECAALLCYFFRMPRQVFNAQKKAQSSTDEDNEQKQLFVEQHKHYLDEIIEQISEFSKRVILADANLDKVLSAYNKHRDKPIREQAENIIHLFTLTNLGAPAAFKYFDTTIDRKRYTSTKEVLDATLIHQSITGLYETRIDLSQLGGD

SEQ ID NO: 278 - protein, 1546 aa, synthetic construct
  REGION 1..1546: note = 110.6 Cas9 TadAins 1251 polypeptide sequence
MDKKYSIGLAIGTNSVGWAVITDEYKVPSKKFKVLGNTDRHSIKKNLIGALLFDSGETAEATRLKRTARRRYTRRKNRICYLQEIFSNEMAKVDDSFFHRLEESFLVEEDKKHERHPIFGNIVDEVAYHEKYPTIYHLRKKLVDSTDKADLRLIYLALAHMIKFRGHFLIEGDLNPDNSDVDKLFIQLVQTYNQLFEENPINASGVDAKAILSARLSKSRRLENLIAQLPGEKKNGLFGNLIALSLGLTPNFKSNFDLAEDAKLQLSKDTYDDDLDNLLAQIGDQYADLFLAAKNLSDAILLSDILRVNTEITKAPLSASMIKRYDEHHQDLTLLKALVRQQLPEKYKEIFFDQSKNGYAGYIDGGASQEEFYKFIKPILEKMDGTEELLVKLNREDLLRKQRTFDNGSIPHQIHLGELHAILRRQEDFYPFLKDNREKIEKILTFRIPYYVGPLARGNSRFAWMTRKSEETITPWNFEEVVDKGASAQSFIERMTNFDKNLPNEKVLPKHSLLYEYFTVYNELTKVKYVTEGMRKPAFLSGEQKKAIVDLLFKTNRKVTVKQLKEDYFKKIECFDSVEISGVEDRFNASLGTYHDLLKIIKDKDFLDNEENEDILEDIVLTLTLFEDREMIEERLKTYAHLFDDKVMKQLKRRRYTGWGRLSRKLINGIRDKQSGKTILDFLKSDGFANRNFMQLIHDDSLTFKEDIQKAQVSGQGDSLHEHIANLAGSPAIKKGILQTVKVVDELVKVMGRHKPENIVIEMARENQTTQKGQKNSRERMKRIEEGIKELGSQILKEHPVENTQLQNEKLYLYYLQNGRDMYVDQELDINRLSDYDVDHIVPQSFLKDDSIDNKVLTRSDKNRGKSDNVPSEEVVKKMKNYWRQLLNAKLITQRKFDNLTKAERGGLSELDKAGFIKRQLVETRQITKHVAQILDSRMNTKYDENDKLIREVKVITLKSKLVSDFRKDFQFYKVREINNYHHAHDAYLNAVVGTALIKKYPKLESEFVYGDYKVYDVRKMIAKSEQEIGKATAKYFFYSNIMNFFKTEITLANGEIRKRPLIETNGETGEIVWDKGRDFATVRKVLSMPQVNIVKKTEVQTGGFSKESILPKRNSDKLIARKKDWDPKKYGGFDSPTVAYSVLVVAKVEKGKSKKLKSVKELLGITIMERSSFEKNPIDFLEAKGYKEVKKDLIIKLPKYSLFELENGRKRMLASAGELQKGNELALPSKYVNFLYLASHYEKLKGSPEGSSGSSGSETPGTSESATPESGSSSGSEVEFSHEYWMRHALTLAKRARDEREVPVGAVLVLNNRVIGEGWNRAIGLHDPTAHAEIMALRQGGLVMQNYRLIDATLYVTFEPCVMCAGAMIHSRIGRVVFGVRNAKTGAAGSLMDVLHYPGMNHRVEITEGILADECAALLCYFFRMRRDNEQKQLFVEQHKHYLDEIIEQISEFSKRVILADANLDKVLSAYNKHRDKPIREQAENIIHLFTLTNLGAPAAFKYFDTTIDRKRYTSTKEVLDATLIHQSITGLYETRIDLSQLGGD

SEQ ID NO: 279 - protein, 1546 aa, synthetic construct
  REGION 1..1546: note = 110.7 Cas9 TadAins 1252 polypeptide sequence
MDKKYSIGLAIGTNSVGWAVITDEYKVPSKKFKVLGNTDRHSIKKNLIGALLFDSGETAEATRLKRTARRRYTRRKNRICYLQEIFSNEMAKVDDSFFHRLEESFLVEEDKKHERHPIFGNIVDEVAYHEKYPTIYHLRKKLVDSTDKADLRLIYLALAHMIKFRGHFLIEGDLNPDNSDVDKLFIQLVQTYNQLFEENPINASGVDAKAILSARLSKSRRLENLIAQLPGEKKNGLFGNLIALSLGLTPNFKSNFDLAEDAKLQLSKDTYDDDLDNLLAQIGDQYADLFLAAKNLSDAILLSDILRVNTEITKAPLSASMIKRYDEHHQDLTLLKALVRQQLPEKYKEIFFDQSKNGYAGYIDGGASQEEFYKFIKPILEKMDGTEELLVKLNREDLLRKQRTFDNGSIPHQIHLGELHAILRRQEDFYPFLKDNREKIEKILTFRIPYYVGPLARGNSRFAWMTRKSEETITPWNFEEVVDKGASAQSFIERMTNFDKNLPNEKVLPKHSLLYEYFTVYNELTKVKYVTEGMRKPAFLSGEQKKAIVDLLFKTNRKVTVKQLKEDYFKKIECFDSVEISGVEDRFNASLGTYHDLLKIIKDKDFLDNEENEDILEDIVLTLTLFEDREMIEERLKTYAHLFDDKVMKQLKRRRYTGWGRLSRKLINGIRDKQSGKTILDFLKSDGFANRNFMQLIHDDSLTFKEDIQKAQVSGQGDSLHEHIANLAGSPAIKKGILQTVKVVDELVKVMGRHKPENIVIEMARENQTTQKGQKNSRERMKRIEEGIKELGSQILKEHPVENTQLQNEKLYLYYLQNGRDMYVDQELDINRLSDYDVDHIVPQSFLKDDSIDNKVLTRSDKNRGKSDNVPSEEVVKKMKNYWRQLLNAKLITQRKFDNLTKAERGGLSELDKAGFIKRQLVETRQITKHVAQILDSRMNTKYDENDKLIREVKVITLKSKLVSDFRKDFQFYKVREINNYHHAHDAYLNAVVGTALIKKYPKLESEFVYGDYKVYDVRKMIAKSEQEIGKATAKYFFYSNIMNFFKTEITLANGEIRKRPLIETNGETGEIVWDKGRDFATVRKVLSMPQVNIVKKTEVQTGGFSKESILPKRNSDKLIARKKDWDPKKYGGFDSPTVAYSVLVVAKVEKGKSKKLKSVKELLGITIMERSSFEKNPIDFLEAKGYKEVKKDLIIKLPKYSLFELENGRKRMLASAGELQKGNELALPSKYVNFLYLASHYEKLKGSPEDGSSGSSGSETPGTSESATPESGSSSGSEVEFSHEYWMRHALTLAKRARDEREVPVGAVLVLNNRVIGEGWNRAIGLHDPTAHAEIMALRQGGLVMQNYRLIDATLYVTFEPCVMCAGAMIHSRIGRVVFGVRNAKTGAAGSLMDVLHYPGMNHRVEITEGILADECAALLCYFFRMRRNEQKQLFVEQHKHYLDEIIEQISEFSKRVILADANLDKVLSAYNKHRDKPIREQAENIIHLFTLTNLGAPAAFKYFDTTIDRKRYTSTKEVLDATLIHQSITGLYETRIDLSQLGGD

SEQ ID NO: 280 - protein, 1533 aa, synthetic construct
  REGION 1..1533: note = 110.8 Cas9 TadAins delta59-66 C-truncate 1250 polypeptide sequence
MDKKYSIGLAIGTNSVGWAVITDEYKVPSKKFKVLGNTDRHSIKKNLIGALLFDSGETAEATRLKRTARRRYTRRKNRICYLQEIFSNEMAKVDDSFFHRLEESFLVEEDKKHERHPIFGNIVDEVAYHEKYPTIYHLRKKLVDSTDKADLRLIYLALAHMIKFRGHFLIEGDLNPDNSDVDKLFIQLVQTYNQLFEENPINASGVDAKAILSARLSKSRRLENLIAQLPGEKKNGLFGNLIALSLGLTPNFKSNFDLAEDAKLQLSKDTYDDDLDNLLAQIGDQYADLFLAAKNLSDAILLSDILRVNTEITKAPLSASMIKRYDEHHQDLTLLKALVRQQLPEKYKEIFFDQSKNGYAGYIDGGASQEEFYKFIKPILEKMDGTEELLVKLNREDLLRKQRTFDNGSIPHQIHLGELHAILRRQEDFYPFLKDNREKIEKILTFRIPYYVGPLARGNSRFAWMTRKSEETITPWNFEEVVDKGASAQSFIERMTNFDKNLPNEKVLPKHSLLYEYFTVYNELTKVKYVTEGMRKPAFLSGEQKKAIVDLLFKTNRKVTVKQLKEDYFKKIECFDSVEISGVEDRFNASLGTYHDLLKIIKDKDFLDNEENEDILEDIVLTLTLFEDREMIEERLKTYAHLFDDKVMKQLKRRRYTGWGRLSRKLINGIRDKQSGKTILDFLKSDGFANRNFMQLIHDDSLTFKEDIQKAQVSGQGDSLHEHIANLAGSPAIKKGILQTVKVVDELVKVMGRHKPENIVIEMARENQTTQKGQKNSRERMKRIEEGIKELGSQILKEHPVENTQLQNEKLYLYYLQNGRDMYVDQELDINRLSDYDVDHIVPQSFLKDDSIDNKVLTRSDKNRGKSDNVPSEEVVKKMKNYWRQLLNAKLITQRKFDNLTKAERGGLSELDKAGFIKRQLVETRQITKHVAQILDSRMNTKYDENDKLIREVKVITLKSKLVSDFRKDFQFYKVREINNYHHAHDAYLNAVVGTALIKKYPKLESEFVYGDYKVYDVRKMIAKSEQEIGKATAKYFFYSNIMNFFKTEITLANGEIRKRPLIETNGETGEIVWDKGRDFATVRKVLSMPQVNIVKKTEVQTGGFSKESILPKRNSDKLIARKKDWDPKKYGGFDSPTVAYSVLVVAKVEKGKSKKLKSVKELLGITIMERSSFEKNPIDFLEAKGYKEVKKDLIIKLPKYSLFELENGRKRMLASAGELQKGNELALPSKYVNFLYLASHYEKLKGSPGSSGSETPGTSESATPESSGSEVEFSHEYWMRHALTLAKRARDEREVPVGAVLVLNNRVIGEGWNRAHAEIMALRQGGLVMQNYRLIDATLYVTFEPCVMCAGAMIHSRIGRVVFGVRNAKTGAAGSLMDVLHYPGMNHRVEITEGILADECAALLCYFFRMPRQEDNEQKQLFVEQHKHYLDEIIEQISEFSKRVILADANLDKVLSAYNKHRDKPIREQAENIIHLFTLTNLGAPAAFKYFDTTIDRKRYTSTKEVLDATLIHQSITGLYETRIDLSQLGGD

SEQ ID NO: 281 - protein, 1549 aa, synthetic construct
  REGION 1..1549: note = 111.1 Cas9 TadAins 997 polypeptide sequence
MDKKYSIGLAIGTNSVGWAVITDEYKVPSKKFKVLGNTDRHSIKKNLIGALLFDSGETAEATRLKRTARRRYTRRKNRICYLQEIFSNEMAKVDDSFFHRLEESFLVEEDKKHERHPIFGNIVDEVAYHEKYPTIYHLRKKLVDSTDKADLRLIYLALAHMIKFRGHFLIEGDLNPDNSDVDKLFIQLVQTYNQLFEENPINASGVDAKAILSARLSKSRRLENLIAQLPGEKKNGLFGNLIALSLGLTPNFKSNFDLAEDAKLQLSKDTYDDDLDNLLAQIGDQYADLFLAAKNLSDAILLSDILRVNTEITKAPLSASMIKRYDEHHQDLTLLKALVRQQLPEKYKEIFFDQSKNGYAGYIDGGASQEEFYKFIKPILEKMDGTEELLVKLNREDLLRKQRTFDNGSIPHQIHLGELHAILRRQEDFYPFLKDNREKIEKILTFRIPYYVGPLARGNSRFAWMTRKSEETITPWNFEEVVDKGASAQSFIERMTNFDKNLPNEKVLPKHSLLYEYFTVYNELTKVKYVTEGMRKPAFLSGEQKKAIVDLLFKTNRKVTVKQLKEDYFKKIECFDSVEISGVEDRFNASLGTYHDLLKIIKDKDFLDNEENEDILEDIVLTLTLFEDREMIEERLKTYAHLFDDKVMKQLKRRRYTGWGRLSRKLINGIRDKQSGKTILDFLKSDGFANRNFMQLIHDDSLTFKEDIQKAQVSGQGDSLHEHIANLAGSPAIKKGILQTVKVVDELVKVMGRHKPENIVIEMARENQTTQKGQKNSRERMKRIEEGIKELGSQILKEHPVENTQLQNEKLYLYYLQNGRDMYVDQELDINRLSDYDVDHIVPQSFLKDDSIDNKVLTRSDKNRGKSDNVPSEEVVKKMKNYWRQLLNAKLITQRKFDNLTKAERGGLSELDKAGFIKRQLVETRQITKHVAQILDSRMNTKYDENDKLIREVKVITLKSKLVSDFRKDFQFYKVREINNYHHAHDAYLNAVVGTALSHEYWMRHALTLAKRARDEREVPVGAVLVLNNRVIGEGWNRAIGLHDPTAHAEIMALRQGGLVMQNYRLIDATLYVTFEPCVMCAGAMIHSRIGRVVFGVRNAKTGAAGSLMDVLHYPGMNHRVEITEGILADECAALLCYFFRMPRQVFNAQKKAQSSTDGSSGSETPGTSESATPESSGIKKYPKLESEFVYGDYKVYDVRKMIAKSEQEIGKATAKYFFYSNIMNFFKTEITLANGEIRKRPLIETNGETGEIVWDKGRDFATVRKVLSMPQVNIVKKTEVQTGGFSKESILPKRNSDKLIARKKDWDPKKYGGFDSPTVAYSVLVVAKVEKGKSKKLKSVKELLGITIMERSSFEKNPIDFLEAKGYKEVKKDLIIKLPKYSLFELENGRKRMLASAGELQKGNELALPSKYVNFLYLASHYEKLKGSPEDNEQKQLFVEQHKHYLDEIIEQISEFSKRVILADANLDKVLSAYNKHRDKPIREQAENIIHLFTLTNLGAPAAFKYFDTTIDRKRYTSTKEVLDATLIHQSITGLYETRIDLSQLGGD

SEQ ID NO: 282 - protein, 1555 aa, synthetic construct
  REGION 1..1555: note = 111.2 Cas9 TadAins 997 polypeptide sequence
MDKKYSIGLAIGTNSVGWAVITDEYKVPSKKFKVLGNTDRHSIKKNLIGALLFDSGETAEATRLKRTARRRYTRRKNRICYLQEIFSNEMAKVDDSFFHRLEESFLVEEDKKHERHPIFGNIVDEVAYHEKYPTIYHLRKKLVDSTDKADLRLIYLALAHMIKFRGHFLIEGDLNPDNSDVDKLFIQLVQTYNQLFEENPINASGVDAKAILSARLSKSRRLENLIAQLPGEKKNGLFGNLIALSLGLTPNFKSNFDLAEDAKLQLSKDTYDDDLDNLLAQIGDQYADLFLAAKNLSDAILLSDILRVNTEITKAPLSASMIKRYDEHHQDLTLLKALVRQQLPEKYKEIFFDQSKNGYAGYIDGGASQEEFYKFIKPILEKMDGTEELLVKLNREDLLRKQRTFDNGSIPHQIHLGELHAILRRQEDFYPFLKDNREKIEKILTFRIPYYVGPLARGNSRFAWMTRKSEETITPWNFEEVVDKGASAQSFIERMTNFDKNLPNEKVLPKHSLLYEYFTVYNELTKVKYVTEGMRKPAFLSGEQKKAIVDLLFKTNRKVTVKQLKEDYFKKIECFDSVEISGVEDRFNASLGTYHDLLKIIKDKDFLDNEENEDILEDIVLTLTLFEDREMIEERLKTYAHLFDDKVMKQLKRRRYTGWGRLSRKLINGIRDKQSGKTILDFLKSDGFANRNFMQLIHDDSLTFKEDIQKAQVSGQGDSLHEHIANLAGSPAIKKGILQTVKVVDELVKVMGRHKPENIVIEMARENQTTQKGQKNSRERMKRIEEGIKELGSQILKEHPVENTQLQNEKLYLYYLQNGRDMYVDQELDINRLSDYDVDHIVPQSFLKDDSIDNKVLTRSDKNRGKSDNVPSEEVVKKMKNYWRQLLNAKLITQRKFDNLTKAERGGLSELDKAGFIKRQLVETRQITKHVAQILDSRMNTKYDENDKLIREVKVITLKSKLVSDFRKDFQFYKVREINNYHHAHDAYLNAVVGTALSHEYWMRHALTLAKRARDEREVPVGAVLVLNNRVIGEGWNRAIGLHDPTAHAEIMALRQGGLVMQNYRLIDATLYVTFEPCVMCAGAMIHSRIGRVVFGVRNAKTGAAGSLMDVLHYPGMNHRVEITEGILADECAALLCYFFRMPRQVFNAQKKAQSSTDGSSGSSGSETPGTSESATPESSGGSSIKKYPKLESEFVYGDYKVYDVRKMIAKSEQEIGKATAKYFFYSNIMNFFKTEITLANGEIRKRPLIETNGETGEIVWDKGRDFATVRKVLSMPQVNIVKKTEVQTGGFSKESILPKRNSDKLIARKKDWDPKKYGGFDSPTVAYSVLVVAKVEKGKSKKLKSVKELLGITIMERSSFEKNPIDFLEAKGYKEVKKDLIIKLPKYSLFELENGRKRMLASAGELQKGNELALPSKYVNFLYLASHYEKLKGSPEDNEQKQLFVEQHKHYLDEIIEQISEFSKRVILADANLDKVLSAYNKHRDKPIREQAENIIHLFTLTNLGAPAAFKYFDTTIDRKRYTSTKEVLDATLIHQSITGLYETRIDLSQLGGD

SEQ ID NO: 283 - protein, 1421 aa, synthetic construct
  REGION 1..1421: note = 112 delta HNH TadA polypeptide sequence
MDKKYSIGLAIGTNSVGWAVITDEYKVPSKKFKVLGNTDRHSIKKNLIGALLFDSGETAEATRLKRTARRRYTRRKNRICYLQEIFSNEMAKVDDSFFHRLEESFLVEEDKKHERHPIFGNIVDEVAYHEKYPTIYHLRKKLVDSTDKADLRLIYLALAHMIKFRGHFLIEGDLNPDNSDVDKLFIQLVQTYNQLFEENPINASGVDAKAILSARLSKSRRLENLIAQLPGEKKNGLFGNLIALSLGLTPNFKSNFDLAEDAKLQLSKDTYDDDLDNLLAQIGDQYADLFLAAKNLSDAILLSDILRVNTEITKAPLSASMIKRYDEHHQDLTLLKALVRQQLPEKYKEIFFDQSKNGYAGYIDGGASQEEFYKFIKPILEKMDGTEELLVKLNREDLLRKQRTFDNGSIPHQIHLGELHAILRRQEDFYPFLKDNREKIEKILTFRIPYYVGPLARGNSRFAWMTRKSEETITPWNFEEVVDKGASAQSFIERMTNFDKNLPNEKVLPKHSLLYEYFTVYNELTKVKYVTEGMRKPAFLSGEQKKAIVDLLFKTNRKVTVKQLKEDYFKKIECFDSVEISGVEDRFNASLGTYHDLLKIIKDKDFLDNEENEDILEDIVLTLTLFEDREMIEERLKTYAHLFDDKVMKQLKRRRYTGWGRLSRKLINGIRDKQSGKTILDFLKSDGFANRNFMQLIHDDSLTFKEDIQKAQVSGQGDSLHEHIANLAGSPAIKKGILQTVKVVDELVKVMGRHKPENIVIEMARENQTTQKGQKNSRERMKRIEEGIKELGSEVEFSHEYWMRHALTLAKRARDEREVPVGAVLVLNNRVIGEGWNRAIGLHDPTAHAEIMALRQGGLVMQNYRLIDATLYVTFEPCVMCAGAMIHSRIGRVVFGVRNAKTGAAGSLMDVLHYPGMNHRVEITEGILADECAALLCYFFRMPRQVFNAQKKAQSSTDGGLSELDKAGFIKRQLVETRQITKHVAQILDSRMNTKYDENDKLIREVKVITLKSKLVSDFRKDFQFYKVREINNYHHAHDAYLNAVVGTALIKKYPKLESEFVYGDYKVYDVRKMIAKSEQEIGKATAKYFFYSNIMNFFKTEITLANGEIRKRPLIETNGETGEIVWDKGRDFATVRKVLSMPQVNIVKKTEVQTGGFSKESILPKRNSDKLIARKKDWDPKKYGGFDSPTVAYSVLVVAKVEKGKSKKLKSVKELLGITIMERSSFEKNPIDFLEAKGYKEVKKDLIIKLPKYSLFELENGRKRMLASAGELQKGNELALPSKYVNFLYLASHYEKLKGSPEDNEQKQLFVEQHKHYLDEIIEQISEFSKRVILADANLDKVLSAYNKHRDKPIREQAENIIHLFTLTNLGAPAAFKYFDTTIDRKRYTSTKEVLDATLIHQSITGLYETRIDLSQLGGD

SEQ ID NO: 284 - protein, 1552 aa, synthetic construct
  REGION 1..1552: note = 113 N-term single TadA helixtrunc 165-end polypeptide sequence
MSEVEFSHEYWMRHALTLAKRARDEREVPVGAVLVLNNRVIGEGWNRAIGLHDPTAHAEIMALRQGGLVMQNYRLIDATLYVTFEPCVMCAGAMIHSRIGRVVFGVRNAKTGAAGSLMDVLHYPGMNHRVEITEGILADECAALLCYFFRMPRSGGSSGGSSGSETPGTSESATPESSGGSSGGSDKKYSIGLAIGTNSVGWAVITDEYKVPSKKFKVLGNTDRHSIKKNLIGALLFDSGETAEATRLKRTARRRYTRRKNRICYLQEIFSNEMAKVDDSFFHRLEESFLVEEDKKHERHPIFGNIVDEVAYHEKYPTIYHLRKKLVDSTDKADLRLIYLALAHMIKFRGHFLIEGDLNPDNSDVDKLFIQLVQTYNQLFEENPINASGVDAKAILSARLSKSRRLENLIAQLPGEKKNGLFGNLIALSLGLTPNFKSNFDLAEDAKLQLSKDTYDDDLDNLLAQIGDQYADLFLAAKNLSDAILLSDILRVNTEITKAPLSASMIKRYDEHHQDLTLLKALVRQQLPEKYKEIFFDQSKNGYAGYIDGGASQEEFYKFIKPILEKMDGTEELLVKLNREDLLRKQRTFDNGSIPHQIHLGELHAILRRQEDFYPFLKDNREKIEKILTFRIPYYVGPLARGNSRFAWMTRKSEETITPWNFEEVVDKGASAQSFIERMTNFDKNLPNEKVLPKHSLLYEYFTVYNELTKVKYVTEGMRKPAFLSGEQKKAIVDLLFKTNRKVTVKQLKEDYFKKIECFDSVEISGVEDRFNASLGTYHDLLKIIKDKDFLDNEENEDILEDIVLTLTLFEDREMIEERLKTYAHLFDDKVMKQLKRRRYTGWGRLSRKLINGIRDKQSGKTILDFLKSDGFANRNFMQLIHDDSLTFKEDIQKAQVSGQGDSLHEHIANLAGSPAIKKGILQTVKVVDELVKVMGRHKPENIVIEMARENQTTQKGQKNSRERMKRIEEGIKELGSQILKEHPVENTQLQNEKLYLYYLQNGRDMYVDQELDINRLSDYDVDHIVPQSFLKDDSIDNKVLTRSDKNRGKSDNVPSEEVVKKMKNYWRQLLNAKLITQRKFDNLTKAERGGLSELDKAGFIKRQLVETRQITKHVAQILDSRMNTKYDENDKLIREVKVITLKSKLVSDFRKDFQFYKVREINNYHHAHDAYLNAVVGTALIKKYPKLESEFVYGDYKVYDVRKMIAKSEQEIGKATAKYFFYSNIMNFFKTEITLANGEIRKRPLIETNGETGEIVWDKGRDFATVRKVLSMPQVNIVKKTEVQTGGFSKESILPKRNSDKLIARKKDWDPKKYGGFDSPTVAYSVLVVAKVEKGKSKKLKSVKELLGITIMERSSFEKNPIDFLEAKGYKEVKKDLIIKLPKYSLFELENGRKRMLASAGELQKGNELALPSKYVNFLYLASHYEKLKGSPEDNEQKQLFVEQHKHYLDEIIEQISEFSKRVILADANLDKVLSAYNKHRDKPIREQAENIIHLFTLTNLGAPAAFKYFDTTIDRKRYTSTKEVLDATLIHQSITGLYETRIDLSQLGGD

SEQ ID NO: 285 - protein, 1545 aa, synthetic construct
  REGION 1..1545: note = 114 N-term single TadA helixtrunc 165-end delta 59-65 polypeptide sequence
MSEVEFSHEYWMRHALTLAKRARDEREVPVGAVLVLNNRVIGEGWNRTAHAEIMALRQGGLVMQNYRLIDATLYVTFEPCVMCAGAMIHSRIGRVVFGVRNAKTGAAGSLMDVLHYPGMNHRVEITEGILADECAALLCYFFRMPRSGGSSGGSSGSETPGTSESATPESSGGSSGGSDKKYSIGLAIGTNSVGWAVITDEYKVPSKKFKVLGNTDRHSIKKNLIGALLFDSGETAEATRLKRTARRRYTRRKNRICYLQEIFSNEMAKVDDSFFHRLEESFLVEEDKKHERHPIFGNIVDEVAYHEKYPTIYHLRKKLVDSTDKADLRLIYLALAHMIKFRGHFLIEGDLNPDNSDVDKLFIQLVQTYNQLFEENPINASGVDAKAILSARLSKSRRLENLIAQLPGEKKNGLFGNLIALSLGLTPNFKSNFDLAEDAKLQLSKDTYDDDLDNLLAQIGDQYADLFLAAKNLSDAILLSDILRVNTEITKAPLSASMIKRYDEHHQDLTLLKALVRQQLPEKYKEIFFDQSKNGYAGYIDGGASQEEFYKFIKPILEKMDGTEELLVKLNREDLLRKQRTFDNGSIPHQIHLGELHAILRRQEDFYPFLKDNREKIEKILTFRIPYYVGPLARGNSRFAWMTRKSEETITPWNFEEVVDKGASAQSFIERMTNFDKNLPNEKVLPKHSLLYEYFTVYNELTKVKYVTEGMRKPAFLSGEQKKAIVDLLFKTNRKVTVKQLKEDYFKKIECFDSVEISGVEDRFNASLGTYHDLLKIIKDKDFLDNEENEDILEDIVLTLTLFEDREMIEERLKTYAHLFDDKVMKQLKRRRYTGWGRLSRKLINGIRDKQSGKTILDFLKSDGFANRNFMQLIHDDSLTFKEDIQKAQVSGQGDSLHEHIANLAGSPAIKKGILQTVKVVDELVKVMGRHKPENIVIEMARENQTTQKGQKNSRERMKRIEEGIKELGSQILKEHPVENTQLQNEKLYLYYLQNGRDMYVDQELDINRLSDYDVDHIVPQSFLKDDSIDNKVLTRSDKNRGKSDNVPSEEVVKKMKNYWRQLLNAKLITQRKFDNLTKAERGGLSELDKAGFIKRQLVETRQITKHVAQILDSRMNTKYDENDKLIREVKVITLKSKLVSDFRKDFQFYKVREINNYHHAHDAYLNAVVGTALIKKYPKLESEFVYGDYKVYDVRKMIAKSEQEIGKATAKYFFYSNIMNFFKTEITLANGEIRKRPLIETNGETGEIVWDKGRDFATVRKVLSMPQVNIVKKTEVQTGGFSKESILPKRNSDKLIARKKDWDPKKYGGFDSPTVAYSVLVVAKVEKGKSKKLKSVKELLGITIMERSSFEKNPIDFLEAKGYKEVKKDLIIKLPKYSLFELENGRKRMLASAGELQKGNELALPSKYVNFLYLASHYEKLKGSPEDNEQKQLFVEQHKHYLDEIIEQISEFSKRVILADANLDKVLSAYNKHRDKPIREQAENIIHLFTLTNLGAPAAFKYFDTTIDRKRYTSTKEVLDATLIHQSITGLYETRIDLSQLGGD

SEQ ID NO: 286 - protein, 1541 aa, synthetic construct
  REGION 1..1541: note = 115.1 Cas9 TadAins 1004 polypeptide sequence
MDKKYSIGLAIGTNSVGWAVITDEYKVPSKKFKVLGNTDRHSIKKNLIGALLFDSGETAEATRLKRTARRRYTRRKNRICYLQEIFSNEMAKVDDSFFHRLEESFLVEEDKKHERHPIFGNIVDEVAYHEKYPTIYHLRKKLVDSTDKADLRLIYLALAHMIKFRGHFLIEGDLNPDNSDVDKLFIQLVQTYNQLFEENPINASGVDAKAILSARLSKSRRLENLIAQLPGEKKNGLFGNLIALSLGLTPNFKSNFDLAEDAKLQLSKDTYDDDLDNLLAQIGDQYADLFLAAKNLSDAILLSDILRVNTEITKAPLSASMIKRYDEHHQDLTLLKALVRQQLPEKYKEIFFDQSKNGYAGYIDGGASQEEFYKFIKPILEKMDGTEELLVKLNREDLLRKQRTFDNGSIPHQIHLGELHAILRRQEDFYPFLKDNREKIEKILTFRIPYYVGPLARGNSRFAWMTRKSEETITPWNFEEVVDKGASAQSFIERMTNFDKNLPNEKVLPKHSLLYEYFTVYNELTKVKYVTEGMRKPAFLSGEQKKAIVDLLFKTNRKVTVKQLKEDYFKKIECFDSVEISGVEDRFNASLGTYHDLLKIIKDKDFLDNEENEDILEDIVLTLTLFEDREMIEERLKTYAHLFDDKVMKQLKRRRYTGWGRLSRKLINGIRDKQSGKTILDFLKSDGFANRNFMQLIHDDSLTFKEDIQKAQVSGQGDSLHEHIANLAGSPAIKKGILQTVKVVDELVKVMGRHKPENIVIEMARENQTTQKGQKNSRERMKRIEEGIKELGSQILKEHPVENTQLQNEKLYLYYLQNGRDMYVDQELDINRLSDYDVDHIVPQSFLKDDSIDNKVLTRSDKNRGKSDNVPSEEVVKKMKNYWRQLLNAKLITQRKFDNLTKAERGGLSELDKAGFIKRQLVETRQITKHVAQILDSRMNTKYDENDKLIREVKVITLKSKLVSDFRKDFQFYKVREINNYHHAHDAYLNAVVGTALIKKYPKGSSGSETPGTSESATPESSGSEVEFSHEYWMRHALTLAKRARDEREVPVGAVLVLNNRVIGEGWNRAIGLHDPTAHAEIMALRQGGLVMQNYRLIDATLYVTFEPCVMCAGAMIHSRIGRVVFGVRNAKTGAAGSLMDVLHYPGMNHRVEITEGILADECAALLCYFFRMPRQLESEFVYGDYKVYDVRKMIAKSEQEIGKATAKYFFYSNIMNFFKTEITLANGEIRKRPLIETNGETGEIVWDKGRDFATVRKVLSMPQVNIVKKTEVQTGGFSKESILPKRNSDKLIARKKDWDPKKYGGFDSPTVAYSVLVVAKVEKGKSKKLKSVKELLGITIMERSSFEKNPIDFLEAKGYKEVKKDLIIKLPKYSLFELENGRKRMLASAGELQKGNELALPSKYVNFLYLASHYEKLKGSPEDNEQKQLFVEQHKHYLDEIIEQISEFSKRVILADANLDKVLSAYNKHRDKPIREQAENIIHLFTLTNLGAPAAFKYFDTTIDRKRYTSTKEVLDATLIHQSITGLYETRIDLSQLGGD

SEQ ID NO: 287 - protein, 1541 aa, synthetic construct
  REGION 1..1541: note = 115.2 Cas9 TadAins 1005 polypeptide sequence
MDKKYSIGLAIGTNSVGWAVITDEYKVPSKKFKVLGNTDRHSIKKNLIGALLFDSGETAEATRLKRTARRRYTRRKNRICYLQEIFSNEMAKVDDSFFHRLEESFLVEEDKKHERHPIFGNIVDEVAYHEKYPTIYHLRKKLVDSTDKADLRLIYLALAHMIKFRGHFLIEGDLNPDNSDVDKLFIQLVQTYNQLFEENPINASGVDAKAILSARLSKSRRLENLIAQLPGEKKNGLFGNLIALSLGLTPNFKSNFDLAEDAKLQLSKDTYDDDLDNLLAQIGDQYADLFLAAKNLSDAILLSDILRVNTEITKAPLSASMIKRYDEHHQDLTLLKALVRQQLPEKYKEIFFDQSKNGYAGYIDGGASQEEFYKFIKPILEKMDGTEELLVKLNREDLLRKQRTFDNGSIPHQIHLGELHAILRRQEDFYPFLKDNREKIEKILTFRIPYYVGPLARGNSRFAWMTRKSEETITPWNFEEVVDKGASAQSFIERMTNFDKNLPNEKVLPKHSLLYEYFTVYNELTKVKYVTEGMRKPAFLSGEQKKAIVDLLFKTNRKVTVKQLKEDYFKKIECFDSVEISGVEDRFNASLGTYHDLLKIIKDKDFLDNEENEDILEDIVLTLTLFEDREMIEERLKTYAHLFDDKVMKQLKRRRYTGWGRLSRKLINGIRDKQSGKTILDFLKSDGFANRNFMQLIHDDSLTFKEDIQKAQVSGQGDSLHEHIANLAGSPAIKKGILQTVKVVDELVKVMGRHKPENIVIEMARENQTTQKGQKNSRERMKRIEEGIKELGSQILKEHPVENTQLQNEKLYLYYLQNGRDMYVDQELDINRLSDYDVDHIVPQSFLKDDSIDNKVLTRSDKNRGKSDNVPSEEVVKKMKNYWRQLLNAKLITQRKFDNLTKAERGGLSELDKAGFIKRQLVETRQITKHVAQILDSRMNTKYDENDKLIREVKVITLKSKLVSDFRKDFQFYKVREINNYHHAHDAYLNAVVGTALIKKYPKLGSSGSETPGTSESATPESSGSEVEFSHEYWMRHALTLAKRARDEREVPVGAVLVLNNRVIGEGWNRAIGLHDPTAHAEIMALRQGGLVMQNYRLIDATLYVTFEPCVMCAGAMIHSRIGRVVFGVRNAKTGAAGSLMDVLHYPGMNHRVEITEGILADECAALLCYFFRMPRQESEFVYGDYKVYDVRKMIAKSEQEIGKATAKYFFYSNIMNFFKTEITLANGEIRKRPLIETNGETGEIVWDKGRDFATVRKVLSMPQVNIVKKTEVQTGGFSKESILPKRNSDKLIARKKDWDPKKYGGFDSPTVAYSVLVVAKVEKGKSKKLKSVKELLGITIMERSSFEKNPIDFLEAKGYKEVKKDLIIKLPKYSLFELENGRKRMLASAGELQKGNELALPSKYVNFLYLASHYEKLKGSPEDNEQKQLFVEQHKHYLDEIIEQISEFSKRVILADANLDKVLSAYNKHRDKPIREQAENIIHLFTLTNLGAPAAFKYFDTTIDRKRYTSTKEVLDATLIHQSITGLYETRIDLSQLGGD

SEQ ID NO: 288 - protein, 1541 aa, synthetic construct
  REGION 1..1541: note = 115.3 Cas9 TadAins 1006 polypeptide sequence
MDKKYSIGLAIGTNSVGWAVITDEYKVPSKKFKVLGNTDRHSIKKNLIGALLFDSGETAEATRLKRTARRRYTRRKNRICYLQEIFSNEMAKVDDSFFHRLEESFLVEEDKKHERHPIFGNIVDEVAYHEKYPTIYHLRKKLVDSTDKADLRLIYLALAHMIKFRGHFLIEGDLNPDNSDVDKLFIQLVQTYNQLFEENPINASGVDAKAILSARLSKSRRLENLIAQLPGEKKNGLFGNLIALSLGLTPNFKSNFDLAEDAKLQLSKDTYDDDLDNLLAQIGDQYADLFLAAKNLSDAILLSDILRVNTEITKAPLSASMIKRYDEHHQDLTLLKALVRQQLPEKYKEIFFDQSKNGYAGYIDGGASQEEFYKFIKPILEKMDGTEELLVKLNREDLLRKQRTFDNGSIPHQIHLGELHAILRRQEDFYPFLKDNREKIEKILTFRIPYYVGPLARGNSRFAWMTRKSEETITPWNFEEVVDKGASAQSFIERMTNFDKNLPNEKVLPKHSLLYEYFTVYNELTKVKYVTEGMRKPAFLSGEQKKAIVDLLFKTNRKVTVKQLKEDYFKKIECFDSVEISGVEDRFNASLGTYHDLLKIIKDKDFLDNEENEDILEDIVLTLTLFEDREMIEERLKTYAHLFDDKVMKQLKRRRYTGWGRLSRKLINGIRDKQSGKTILDFLKSDGFANRNFMQLIHDDSLTFKEDIQKAQVSGQGDSLHEHIANLAGSPAIKKGILQTVKVVDELVKVMGRHKPENIVIEMARENQTTQKGQKNSRERMKRIEEGIKELGSQILKEHPVENTQLQNEKLYLYYLQNGRDMYVDQELDINRLSDYDVDHIVPQSFLKDDSIDNKVLTRSDKNRGKSDNVPSEEVVKKMKNYWRQLLNAKLITQRKFDNLTKAERGGLSELDKAGFIKRQLVETRQITKHVAQILDSRMNTKYDENDKLIREVKVITLKSKLVSDFRKDFQFYKVREINNYHHAHDAYLNAVVGTALIKKYPKLEGSSGSETPGTSESATPESSGSEVEFSHEYWMRHALTLAKRARDEREVPVGAVLVLNNRVIGEGWNRAIGLHDPTAHAEIMALRQGGLVMQNYRLIDATLYVTFEPCVMCAGAMIHSRIGRVVFGVRNAKTGAAGSLMDVLHYPGMNHRVEITEGILADECAALLCYFFRMPRQSEFVYGDYKVYDVRKMIAKSEQEIGKATAKYFFYSNIMNFFKTEITLANGEIRKRPLIETNGETGEIVWDKGRDFATVRKVLSMPQVNIVKKTEVQTGGFSKESILPKRNSDKLIARKKDWDPKKYGGFDSPTVAYSVLVVAKVEKGKSKKLKSVKELLGITIMERSSFEKNPIDFLEAKGYKEVKKDLIIKLPKYSLFELENGRKRMLASAGELQKGNELALPSKYVNFLYLASHYEKLKGSPEDNEQKQLFVEQHKHYLDEIIEQISEFSKRVILADANLDKVLSAYNKHRDKPIREQAENIIHLFTLTNLGAPAAFKYFDTTIDRKRYTSTKEVLDATLIHQSITGLYETRIDLSQLGGD

SEQ ID NO: 289 - protein, 1541 aa, synthetic construct
  REGION 1..1541: note = 115.4 Cas9 TadAins 1007 polypeptide sequence
MDKKYSIGLAIGTNSVGWAVITDEYKVPSKKFKVLGNTDRHSIKKNLIGALLFDSGETAEATRLKRTARRRYTRRKNRICYLQEIFSNEMAKVDDSFFHRLEESFLVEEDKKHERHPIFGNIVDEVAYHEKYPTIYHLRKKLVDSTDKADLRLIYLALAHMIKFRGHFLIEGDLNPDNSDVDKLFIQLVQTYNQLFEENPINASGVDAKAILSARLSKSRRLENLIAQLPGEKKNGLFGNLIALSLGLTPNFKSNFDLAEDAKLQLSKDTYDDDLDNLLAQIGDQYADLFLAAKNLSDAILLSDILRVNTEITKAPLSASMIKRYDEHHQDLTLLKALVRQQLPEKYKEIFFDQSKNGYAGYIDGGASQEEFYKFIKPILEKMDGTEELLVKLNREDLLRKQRTFDNGSIPHQIHLGELHAILRRQEDFYPFLKDNREKIEKILTFRIPYYVGPLARGNSRFAWMTRKSEETITPWNFEEVVDKGASAQSFIERMTNFDKNLPNEKVLPKHSLLYEYFTVYNELTKVKYVTEGMRKPAFLSGEQKKAIVDLLFKTNRKVTVKQLKEDYFKKIECFDSVEISGVEDRFNASLGTYHDLLKIIKDKDFLDNEENEDILEDIVLTLTLFEDREMIEERLKTYAHLFDDKVMKQLKRRRYTGWGRLSRKLINGIRDKQSGKTILDFLKSDGFANRNFMQLIHDDSLTFKEDIQKAQVSGQGDSLHEHIANLAGSPAIKKGILQTVKVVDELVKVMGRHKPENIVIEMARENQTTQKGQKNSRERMKRIEEGIKELGSQILKEHPVENTQLQNEKLYLYYLQNGRDMYVDQELDINRLSDYDVDHIVPQSFLKDDSIDNKVLTRSDKNRGKSDNVPSEEVVKKMKNYWRQLLNAKLITQRKFDNLTKAERGGLSELDKAGFIKRQLVETRQITKHVAQILDSRMNTKYDENDKLIREVKVITLKSKLVSDFRKDFQFYKVREINNYHHAHDAYLNAVVGTALIKKYPKLESGSSGSETPGTSESATPESSGSEVEFSHEYWMRHALTLAKRARDEREVPVGAVLVLNNRVIGEGWNRAIGLHDPTAHAEIMALRQGGLVMQNYRLIDATLYVTFEPCVMCAGAMIHSRIGRVVFGVRNAKTGAAGSLMDVLHYPGMNHRVEITEGILADECAALLCYFFRMPRQEFVYGDYKVYDVRKMIAKSEQEIGKATAKYFFYSNIMNFFKTEITLANGEIRKRPLIETNGETGEIVWDKGRDFATVRKVLSMPQVNIVKKTEVQTGGFSKESILPKRNSDKLIARKKDWDPKKYGGFDSPTVAYSVLVVAKVEKGKSKKLKSVKELLGITIMERSSFEKNPIDFLEAKGYKEVKKDLIIKLPKYSLFELENGRKRMLASAGELQKGNELALPSKYVNFLYLASHYEKLKGSPEDNEQKQLFVEQHKHYLDEIIEQISEFSKRVILADANLDKVLSAYNKHRDKPIREQAENIIHLFTLTNLGAPAAFKYFDTTIDRKRYTSTKEVLDATLIHQSITGLYETRIDLSQLGGD

SEQ ID NO: 290 - protein, 1541 aa, synthetic construct
  REGION 1..1541: note = 116.1 Cas9 TadAins C-term truncate 792 polypeptide sequence
MDKKYSIGLAIGTNSVGWAVITDEYKVPSKKFKVLGNTDRHSIKKNLIGALLFDSGETAEATRLKRTARRRYTRRKNRICYLQEIFSNEMAKVDDSFFHRLEESFLVEEDKKHERHPIFGNIVDEVAYHEKYPTIYHLRKKLVDSTDKADLRLIYLALAHMIKFRGHFLIEGDLNPDNSDVDKLFIQLVQTYNQLFEENPINASGVDAKAILSARLSKSRRLENLIAQLPGEKKNGLFGNLIALSLGLTPNFKSNFDLAEDAKLQLSKDTYDDDLDNLLAQIGDQYADLFLAAKNLSDAILLSDILRVNTEITKAPLSASMIKRYDEHHQDLTLLKALVRQQLPEKYKEIFFDQSKNGYAGYIDGGASQEEFYKFIKPILEKMDGTEELLVKLNREDLLRKQRTFDNGSIPHQIHLGELHAILRRQEDFYPFLKDNREKIEKILTFRIPYYVGPLARGNSRFAWMTRKSEETITPWNFEEVVDKGASAQSFIERMTNFDKNLPNEKVLPKHSLLYEYFTVYNELTKVKYVTEGMRKPAFLSGEQKKAIVDLLFKTNRKVTVKQLKEDYFKKIECFDSVEISGVEDRFNASLGTYHDLLKIIKDKDFLDNEENEDILEDIVLTLTLFEDREMIEERLKTYAHLFDDKVMKQLKRRRYTGWGRLSRKLINGIRDKQSGKTILDFLKSDGFANRNFMQLIHDDSLTFKEDIQKAQVSGQGDSLHEHIANLAGSPAIKKGILQTVKVVDELVKVMGRHKPENIVIEMARENQTTQKGQKNSRERMKRIEEGIKELGGSSGSETPGTSESATPESSGSEVEFSHEYWMRHALTLAKRARDEREVPVGAVLVLNNRVIGEGWNRAIGLHDPTAHAEIMALRQGGLVMQNYRLIDATLYVTFEPCVMCAGAMIHSRIGRVVFGVRNAKTGAAGSLMDVLHYPGMNHRVEITEGILADECAALLCYFFRMPRQSQILKEHPVENTQLQNEKLYLYYLQNGRDMYVDQELDINRLSDYDVDHIVPQSFLKDDSIDNKVLTRSDKNRGKSDNVPSEEVVKKMKNYWRQLLNAKLITQRKFDNLTKAERGGLSELDKAGFIKRQLVETRQITKHVAQILDSRMNTKYDENDKLIREVKVITLKSKLVSDFRKDFQFYKVREINNYHHAHDAYLNAVVGTALIKKYPKLESEFVYGDYKVYDVRKMIAKSEQEIGKATAKYFFYSNIMNFFKTEITLANGEIRKRPLIETNGETGEIVWDKGRDFATVRKVLSMPQVNIVKKTEVQTGGFSKESILPKRNSDKLIARKKDWDPKKYGGFDSPTVAYSVLVVAKVEKGKSKKLKSVKELLGITIMERSSFEKNPIDFLEAKGYKEVKKDLIIKLPKYSLFELENGRKRMLASAGELQKGNELALPSKYVNFLYLASHYEKLKGSPEDNEQKQLFVEQHKHYLDEIIEQISEFSKRVILADANLDKVLSAYNKHRDKPIREQAENIIHLFTLTNLGAPAAFKYFDTTIDRKRYTSTKEVLDATLIHQSITGLYETRIDLSQLGGD

SEQ ID NO: 291 - protein, 1541 aa, synthetic construct
  REGION 1..1541: note = 116.2 Cas9 TadAins C-term truncate 791 polypeptide sequence
MDKKYSIGLAIGTNSVGWAVITDEYKVPSKKFKVLGNTDRHSIKKNLIGALLFDSGETAEATRLKRTARRRYTRRKNRICYLQEIFSNEMAKVDDSFFHRLEESFLVEEDKKHERHPIFGNIVDEVAYHEKYPTIYHLRKKLVDSTDKADLRLIYLALAHMIKFRGHFLIEGDLNPDNSDVDKLFIQLVQTYNQLFEENPINASGVDAKAILSARLSKSRRLENLIAQLPGEKKNGLFGNLIALSLGLTPNFKSNFDLAEDAKLQLSKDTYDDDLDNLLAQIGDQYADLFLAAKNLSDAILLSDILRVNTEITKAPLSASMIKRYDEHHQDLTLLKALVRQQLPEKYKEIFFDQSKNGYAGYIDGGASQEEFYKFIKPILEKMDGTEELLVKLNREDLLRKQRTFDNGSIPHQIHLGELHAILRRQEDFYPFLKDNREKIEKILTFRIPYYVGPLARGNSRFAWMTRKSEETITPWNFEEVVDKGASAQSFIERMTNFDKNLPNEKVLPKHSLLYEYFTVYNELTKVKYVTEGMRKPAFLSGEQKKAIVDLLFKTNRKVTVKQLKEDYFKKIECFDSVEISGVEDRFNASLGTYHDLLKIIKDKDFLDNEENEDILEDIVLTLTLFEDREMIEERLKTYAHLFDDKVMKQLKRRRYTGWGRLSRKLINGIRDKQSGKTILDFLKSDGFANRNFMQLIHDDSLTFKEDIQKAQVSGQGDSLHEHIANLAGSPAIKKGILQTVKVVDELVKVMGRHKPENIVIEMARENQTTQKGQKNSRERMKRIEEGIKELGSSGSETPGTSESATPESSGSEVEFSHEYWMRHALTLAKRARDEREVPVGAVLVLNNRVIGEGWNRAIGLHDPTAHAEIMALRQGGLVMQNYRLIDATLYVTFEPCVMCAGAMIHSRIGRVVFGVRNAKTGAAGSLMDVLHYPGMNHRVEITEGILADECAALLCYFFRMPRQGSQILKEHPVENTQLQNEKLYLYYLQNGRDMYVDQELDINRLSDYDVDHIVPQSFLKDDSIDNKVLTRSDKNRGKSDNVPSEEVVKKMKNYWRQLLNAKLITQRKFDNLTKAERGGLSELDKAGFIKRQLVETRQITKHVAQILDSRMNTKYDENDKLIREVKVITLKSKLVSDFRKDFQFYKVREINNYHHAHDAYLNAVVGTALIKKYPKLESEFVYGDYKVYDVRKMIAKSEQEIGKATAKYFFYSNIMNFFKTEITLANGEIRKRPLIETNGETGEIVWDKGRDFATVRKVLSMPQVNIVKKTEVQTGGFSKESILPKRNSDKLIARKKDWDPKKYGGFDSPTVAYSVLVVAKVEKGKSKKLKSVKELLGITIMERSSFEKNPIDFLEAKGYKEVKKDLIIKLPKYSLFELENGRKRMLASAGELQKGNELALPSKYVNFLYLASHYEKLKGSPEDNEQKQLFVEQHKHYLDEIIEQISEFSKRVILADANLDKVLSAYNKHRDKPIREQAENIIHLFTLTNLGAPAAFKYFDTTIDRKRYTSTKEVLDATLIHQSITGLYETRIDLSQLGGD

SEQ ID NO: 292 - protein, 1541 aa, synthetic construct
  REGION 1..1541: note = 116.3 Cas9 TadAins C-term truncate 790 polypeptide sequence
MDKKYSIGLAIGTNSVGWAVITDEYKVPSKKFKVLGNTDRHSIKKNLIGALLFDSGETAEATRLKRTARRRYTRRKNRICYLQEIFSNEMAKVDDSFFHRLEESFLVEEDKKHERHPIFGNIVDEVAYHEKYPTIYHLRKKLVDSTDKADLRLIYLALAHMIKFRGHFLIEGDLNPDNSDVDKLFIQLVQTYNQLFEENPINASGVDAKAILSARLSKSRRLENLIAQLPGEKKNGLFGNLIALSLGLTPNFKSNFDLAEDAKLQLSKDTYDDDLDNLLAQIGDQYADLFLAAKNLSDAILLSDILRVNTEITKAPLSASMIKRYDEHHQDLTLLKALVRQQLPEKYKEIFFDQSKNGYAGYIDGGASQEEFYKFIKPILEKMDGTEELLVKLNREDLLRKQRTFDNGSIPHQIHLGELHAILRRQEDFYPFLKDNREKIEKILTFRIPYYVGPLARGNSRFAWMTRKSEETITPWNFEEVVDKGASAQSFIERMTNFDKNLPNEKVLPKHSLLYEYFTVYNELTKVKYVTEGMRKPAFLSGEQKKAIVDLLFKTNRKVTVKQLKEDYFKKIECFDSVEISGVEDRFNASLGTYHDLLKIIKDKDFLDNEENEDILEDIVLTLTLFEDREMIEERLKTYAHLFDDKVMKQLKRRRYTGWGRLSRKLINGIRDKQSGKTILDFLKSDGFANRNFMQLIHDDSLTFKEDIQKAQVSGQGDSLHEHIANLAGSPAIKKGILQTVKVVDELVKVMGRHKPENIVIEMARENQTTQKGQKNSRERMKRIEEGIKEGSSGSETPGTSESATPESSGSEVEFSHEYWMRHALTLAKRARDEREVPVGAVLVLNNRVIGEGWNRAIGLHDPTAHAEIMALRQGGLVMQNYRLIDATLYVTFEPCVMCAGAMIHSRIGRVVFGVRNAKTGAAGSLMDVLHYPGMNHRVEITEGILADECAALLCYFFRMPRQLGSQILKEHPVENTQLQNEKLYLYYLQNGRDMYVDQELDINRLSDYDVDHIVPQSFLKDDSIDNKVLTRSDKNRGKSDNVPSEEVVKKMKNYWRQLLNAKLITQRKFDNLTKAERGGLSELDKAGFIKRQLVETRQITKHVAQILDSRMNTKYDENDKLIREVKVITLKSKLVSDFRKDFQFYKVREINNYHHAHDAYLNAVVGTALIKKYPKLESEFVYGDYKVYDVRKMIAKSEQEIGKATAKYFFYSNIMNFFKTEITLANGEIRKRPLIETNGETGEIVWDKGRDFATVRKVLSMPQVNIVKKTEVQTGGFSKESILPKRNSDKLIARKKDWDPKKYGGFDSPTVAYSVLVVAKVEKGKSKKLKSVKELLGITIMERSSFEKNPIDFLEAKGYKEVKKDLIIKLPKYSLFELENGRKRMLASAGELQKGNELALPSKYVNFLYLASHYEKLKGSPEDNEQKQLFVEQHKHYLDEIIEQISEFSKRVILADANLDKVLSAYNKHRDKPIREQAENIIHLFTLTNLGAPAAFKYFDTTIDRKRYTSTKEVLDATLIHQSITGLYETRIDLSQLGGD

SEQ ID NO: 293 - protein, 1484 aa, synthetic construct
  REGION 1..1484: note = 117 Cas9 delta 1017-1069 polypeptide sequence
MDKKYSIGLAIGTNSVGWAVITDEYKVPSKKFKVLGNTDRHSIKKNLIGALLFDSGETAEATRLKRTARRRYTRRKNRICYLQEIFSNEMAKVDDSFFHRLEESFLVEEDKKHERHPIFGNIVDEVAYHEKYPTIYHLRKKLVDSTDKADLRLIYLALAHMIKFRGHFLIEGDLNPDNSDVDKLFIQLVQTYNQLFEENPINASGVDAKAILSARLSKSRRLENLIAQLPGEKKNGLFGNLIALSLGLTPNFKSNFDLAEDAKLQLSKDTYDDDLDNLLAQIGDQYADLFLAAKNLSDAILLSDILRVNTEITKAPLSASMIKRYDEHHQDLTLLKALVRQQLPEKYKEIFFDQSKNGYAGYIDGGASQEEFYKFIKPILEKMDGTEELLVKLNREDLLRKQRTFDNGSIPHQIHLGELHAILRRQEDFYPFLKDNREKIEKILTFRIPYYVGPLARGNSRFAWMTRKSEETITPWNFEEVVDKGASAQSFIERMTNFDKNLPNEKVLPKHSLLYEYFTVYNELTKVKYVTEGMRKPAFLSGEQKKAIVDLLFKTNRKVTVKQLKEDYFKKIECFDSVEISGVEDRFNASLGTYHDLLKIIKDKDFLDNEENEDILEDIVLTLTLFEDREMIEERLKTYAHLFDDKVMKQLKRRRYTGWGRLSRKLINGIRDKQSGKTILDFLKSDGFANRNFMQLIHDDSLTFKEDIQKAQVSGQGDSLHEHIANLAGSPAIKKGILQTVKVVDELVKVMGRHKPENIVIEMARENQTTQKGQKNSRERMKRIEEGIKELGSQILKEHPVENTQLQNEKLYLYYLQNGRDMYVDQELDINRLSDYDVDHIVPQSFLKDDSIDNKVLTRSDKNRGKSDNVPSEEVVKKMKNYWRQLLNAKLITQRKFDNLTKAERGGLSELDKAGFIKRQLVETRQITKHVAQILDSRMNTKYDENDKLIREVKVITLKSKLVSDFRKDFQFYKVREINNYHHAHDAYLNAVVGTALIKKYPKLESEFVYGDYKVYSSGSEVEFSHEYWMRHALTLAKRARDEREVPVGAVLVLNNRVIGEGWNRAIGLHDPTAHAEIMALRQGGLVMQNYRLIDATLYVTFEPCVMCAGAMIHSRIGRVVFGVRNAKTGAAGSLMDVLHYPGMNHRVEITEGILADECAALLCYFFRMPRQVFNAQKKAQSSTDGEIVWDKGRDFATVRKVLSMPQVNIVKKTEVQTGGFSKESILPKRNSDKLIARKKDWDPKKYGGFDSPTVAYSVLVVAKVEKGKSKKLKSVKELLGITIMERSSFEKNPIDFLEAKGYKEVKKDLIIKLPKYSLFELENGRKRMLASAGELQKGNELALPSKYVNFLYLASHYEKLKGSPEDNEQKQLFVEQHKHYLDEIIEQISEFSKRVILADANLDKVLSAYNKHRDKPIREQAENIIHLFTLTNLGAPAAFKYFDTTIDRKRYTSTKEVLDATLIHQSITGLYETRIDLSQLGGD

SEQ ID NO: 294 - protein, 1554 aa, synthetic construct
  REGION 1..1554: note = 118 Cas9 TadA-CP116ins 1067 polypeptide sequence
MDKKYSIGLAIGTNSVGWAVITDEYKVPSKKFKVLGNTDRHSIKKNLIGALLFDSGETAEATRLKRTARRRYTRRKNRICYLQEIFSNEMAKVDDSFFHRLEESFLVEEDKKHERHPIFGNIVDEVAYHEKYPTIYHLRKKLVDSTDKADLRLIYLALAHMIKFRGHFLIEGDLNPDNSDVDKLFIQLVQTYNQLFEENPINASGVDAKAILSARLSKSRRLENLIAQLPGEKKNGLFGNLIALSLGLTPNFKSNFDLAEDAKLQLSKDTYDDDLDNLLAQIGDQYADLFLAAKNLSDAILLSDILRVNTEITKAPLSASMIKRYDEHHQDLTLLKALVRQQLPEKYKEIFFDQSKNGYAGYIDGGASQEEFYKFIKPILEKMDGTEELLVKLNREDLLRKQRTFDNGSIPHQIHLGELHAILRRQEDFYPFLKDNREKIEKILTFRIPYYVGPLARGNSRFAWMTRKSEETITPWNFEEVVDKGASAQSFIERMTNFDKNLPNEKVLPKHSLLYEYFTVYNELTKVKYVTEGMRKPAFLSGEQKKAIVDLLFKTNRKVTVKQLKEDYFKKIECFDSVEISGVEDRFNASLGTYHDLLKIIKDKDFLDNEENEDILEDIVLTLTLFEDREMIEERLKTYAHLFDDKVMKQLKRRRYTGWGRLSRKLINGIRDKQSGKTILDFLKSDGFANRNFMQLIHDDSLTFKEDIQKAQVSGQGDSLHEHIANLAGSPAIKKGILQTVKVVDELVKVMGRHKPENIVIEMARENQTTQKGQKNSRERMKRIEEGIKELGSQILKEHPVENTQLQNEKLYLYYLQNGRDMYVDQELDINRLSDYDVDHIVPQSFLKDDSIDNKVLTRSDKNRGKSDNVPSEEVVKKMKNYWRQLLNAKLITQRKFDNLTKAERGGLSELDKAGFIKRQLVETRQITKHVAQILDSRMNTKYDENDKLIREVKVITLKSKLVSDFRKDFQFYKVREINNYHHAHDAYLNAVVGTALIKKYPKLESEFVYGDYKVYDVRKMIAKSEQEIGKATAKYFFYSNIMNFFKTEITLANGEIRKRPLIETNMNHRVEITEGILADECAALLCYFFRMPRQVFNAQKKAQSSTDGSSGSETPGTSESATPESSGSEVEFSHEYWMRHALTLAKRARDEREVPVGAVLVLNNRVIGEGWNRAIGLHDPTAHAEIMALRQGGLVMQNYRLIDATLYVTFEPCVMCAGAMIHSRIGRVVFGVRNAKTGAAGSLMDVLHYPGGETGEIVWDKGRDFATVRKVLSMPQVNIVKKTEVQTGGFSKESILPKRNSDKLIARKKDWDPKKYGGFDSPTVAYSVLVVAKVEKGKSKKLKSVKELLGITIMERSSFEKNPIDFLEAKGYKEVKKDLIIKLPKYSLFELENGRKRMLASAGELQKGNELALPSKYVNFLYLASHYEKLKGSPEDNEQKQLFVEQHKHYLDEIIEQISEFSKRVILADANLDKVLSAYNKHRDKPIREQAENIIHLFTLTNLGAPAAFKYFDTTIDRKRYTSTKEVLDATLIHQSITGLYETRIDLSQLGGD

SEQ ID NO: 295 - protein, 1554 aa, synthetic construct
  REGION 1..1554: note = 119 Cas9 TadAins 701 polypeptide sequence
MDKKYSIGLAIGTNSVGWAVITDEYKVPSKKFKVLGNTDRHSIKKNLIGALLFDSGETAEATRLKRTARRRYTRRKNRICYLQEIFSNEMAKVDDSFFHRLEESFLVEEDKKHERHPIFGNIVDEVAYHEKYPTIYHLRKKLVDSTDKADLRLIYLALAHMIKFRGHFLIEGDLNPDNSDVDKLFIQLVQTYNQLFEENPINASGVDAKAILSARLSKSRRLENLIAQLPGEKKNGLFGNLIALSLGLTPNFKSNFDLAEDAKLQLSKDTYDDDLDNLLAQIGDQYADLFLAAKNLSDAILLSDILRVNTEITKAPLSASMIKRYDEHHQDLTLLKALVRQQLPEKYKEIFFDQSKNGYAGYIDGGASQEEFYKFIKPILEKMDGTEELLVKLNREDLLRKQRTFDNGSIPHQIHLGELHAILRRQEDFYPFLKDNREKIEKILTFRIPYYVGPLARGNSRFAWMTRKSEETITPWNFEEVVDKGASAQSFIERMTNFDKNLPNEKVLPKHSLLYEYFTVYNELTKVKYVTEGMRKPAFLSGEQKKAIVDLLFKTNRKVTVKQLKEDYFKKIECFDSVEISGVEDRFNASLGTYHDLLKIIKDKDFLDNEENEDILEDIVLTLTLFEDREMIEERLKTYAHLFDDKVMKQLKRRRYTGWGRLSRKLINGIRDKQSGKTILDFLKSDGFANRNFMQLIHDDSGSSGSETPGTSESATPESSGSEVEFSHEYWMRHALTLAKRARDEREVPVGAVLVLNNRVIGEGWNRAIGLHDPTAHAEIMALRQGGLVMQNYRLIDATLYVTFEPCVMCAGAMIHSRIGRVVFGVRNAKTGAAGSLMDVLHYPGMNHRVEITEGILADECAALLCYFFRMPRQVFNAQKKAQSSTDLTFKEDIQKAQVSGQGDSLHEHIANLAGSPAIKKGILQTVKVVDELVKVMGRHKPENIVIEMARENQTTQKGQKNSRERMKRIEEGIKELGSQILKEHPVENTQLQNEKLYLYYLQNGRDMYVDQELDINRLSDYDVDHIVPQSFLKDDSIDNKVLTRSDKNRGKSDNVPSEEVVKKMKNYWRQLLNAKLITQRKFDNLTKAERGGLSELDKAGFIKRQLVETRQITKHVAQILDSRMNTKYDENDKLIREVKVITLKSKLVSDFRKDFQFYKVREINNYHHAHDAYLNAVVGTALIKKYPKLESEFVYGDYKVYDVRKMIAKSEQEIGKATAKYFFYSNIMNFFKTEITLANGEIRKRPLIETNGETGEIVWDKGRDFATVRKVLSMPQVNIVKKTEVQTGGFSKESILPKRNSDKLIARKKDWDPKKYGGFDSPTVAYSVLVVAKVEKGKSKKLKSVKELLGITIMERSSFEKNPIDFLEAKGYKEVKKDLIIKLPKYSLFELENGRKRMLASAGELQKGNELALPSKYVNFLYLASHYEKLKGSPEDNEQKQLFVEQHKHYLDEIIEQISEFSKRVILADANLDKVLSAYNKHRDKPIREQAENIIHLFTLTNLGAPAAFKYFDTTIDRKRYTSTKEVLDATLIHQSITGLYETRIDLSQLGGD

SEQ ID NO: 296 - protein, 1554 aa, synthetic construct
  REGION 1..1554: note = 120 Cas9 TadACP136ins 1248 polypeptide sequence
MDKKYSIGLAIGTNSVGWAVITDEYKVPSKKFKVLGNTDRHSIKKNLIGALLFDSGETAEATRLKRTARRRYTRRKNRICYLQEIFSNEMAKVDDSFFHRLEESFLVEEDKKHERHPIFGNIVDEVAYHEKYPTIYHLRKKLVDSTDKADLRLIYLALAHMIKFRGHFLIEGDLNPDNSDVDKLFIQLVQTYNQLFEENPINASGVDAKAILSARLSKSRRLENLIAQLPGEKKNGLFGNLIALSLGLTPNFKSNFDLAEDAKLQLSKDTYDDDLDNLLAQIGDQYADLFLAAKNLSDAILLSDILRVNTEITKAPLSASMIKRYDEHHQDLTLLKALVRQQLPEKYKEIFFDQSKNGYAGYIDGGASQEEFYKFIKPILEKMDGTEELLVKLNREDLLRKQRTFDNGSIPHQIHLGELHAILRRQEDFYPFLKDNREKIEKILTFRIPYYVGPLARGNSRFAWMTRKSEETITPWNFEEVVDKGASAQSFIERMTNFDKNLPNEKVLPKHSLLYEYFTVYNELTKVKYVTEGMRKPAFLSGEQKKAIVDLLFKTNRKVTVKQLKEDYFKKIECFDSVEISGVEDRFNASLGTYHDLLKIIKDKDFLDNEENEDILEDIVLTLTLFEDREMIEERLKTYAHLFDDKVMKQLKRRRYTGWGRLSRKLINGIRDKQSGKTILDFLKSDGFANRNFMQLIHDDSLTFKEDIQKAQVSGQGDSLHEHIANLAGSPAIKKGILQTVKVVDELVKVMGRHKPENIVIEMARENQTTQKGQKNSRERMKRIEEGIKELGSQILKEHPVENTQLQNEKLYLYYLQNGRDMYVDQELDINRLSDYDVDHIVPQSFLKDDSIDNKVLTRSDKNRGKSDNVPSEEVVKKMKNYWRQLLNAKLITQRKFDNLTKAERGGLSELDKAGFIKRQLVETRQITKHVAQILDSRMNTKYDENDKLIREVKVITLKSKLVSDFRKDFQFYKVREINNYHHAHDAYLNAVVGTALIKKYPKLESEFVYGDYKVYDVRKMIAKSEQEIGKATAKYFFYSNIMNFFKTEITLANGEIRKRPLIETNGETGEIVWDKGRDFATVRKVLSMPQVNIVKKTEVQTGGFSKESILPKRNSDKLIARKKDWDPKKYGGFDSPTVAYSVLVVAKVEKGKSKKLKSVKELLGITIMERSSFEKNPIDFLEAKGYKEVKKDLIIKLPKYSLFELENGRKRMLASAGELQKGNELALPSKYVNFLYLASHYEKLKGSMNHRVEITEGILADECAALLCYFFRMPRQVFNAQKKAQSSTDGSSGSETPGTSESATPESSGSEVEFSHEYWMRHALTLAKRARDEREVPVGAVLVLNNRVIGEGWNRAIGLHDPTAHAEIMALRQGGLVMQNYRLIDATLYVTFEPCVMCAGAMIHSRIGRVVFGVRNAKTGAAGSLMDVLHYPGPEDNEQKQLFVEQHKHYLDEIIEQISEFSKRVILADANLDKVLSAYNKHRDKPIREQAENIIHLFTLTNLGAPAAFKYFDTTIDRKRYTSTKEVLDATLIHQSITGLYETRIDLSQLGGD

SEQ ID NO: 297 - protein, 1554 aa, synthetic construct
  REGION 1..1554: note = 121 Cas9 TadACP136ins 1052 polypeptide sequence
MDKKYSIGLAIGTNSVGWAVITDEYKVPSKKFKVLGNTDRHSIKKNLIGALLFDSGETAEATRLKRTARRRYTRRKNRICYLQEIFSNEMAKVDDSFFHRLEESFLVEEDKKHERHPIFGNIVDEVAYHEKYPTIYHLRKKLVDSTDKADLRLIYLALAHMIKFRGHFLIEGDLNPDNSDVDKLFIQLVQTYNQLFEENPINASGVDAKAILSARLSKSRRLENLIAQLPGEKKNGLFGNLIALSLGLTPNFKSNFDLAEDAKLQLSKDTYDDDLDNLLAQIGDQYADLFLAAKNLSDAILLSDILRVNTEITKAPLSASMIKRYDEHHQDLTLLKALVRQQLPEKYKEIFFDQSKNGYAGYIDGGASQEEFYKFIKPILEKMDGTEELLVKLNREDLLRKQRTFDNGSIPHQIHLGELHAILRRQEDFYPFLKDNREKIEKILTFRIPYYVGPLARGNSRFAWMTRKSEETITPWNFEEVVDKGASAQSFIERMTNFDKNLPNEKVLPKHSLLYEYFTVYNELTKVKYVTEGMRKPAFLSGEQKKAIVDLLFKTNRKVTVKQLKEDYFKKIECFDSVEISGVEDRFNASLGTYHDLLKIIKDKDFLDNEENEDILEDIVLTLTLFEDREMIEERLKTYAHLFDDKVMKQLKRRRYTGWGRLSRKLINGIRDKQSGKTILDFLKSDGFANRNFMQLIHDDSLTFKEDIQKAQVSGQGDSLHEHIANLAGSPAIKKGILQTVKVVDELVKVMGRHKPENIVIEMARENQTTQKGQKNSRERMKRIEEGIKELGSQILKEHPVENTQLQNEKLYLYYLQNGRDMYVDQELDINRLSDYDVDHIVPQSFLKDDSIDNKVLTRSDKNRGKSDNVPSEEVVKKMKNYWRQLLNAKLITQRKFDNLTKAERGGLSELDKAGFIKRQLVETRQITKHVAQILDSRMNTKYDENDKLIREVKVITLKSKLVSDFRKDFQFYKVREINNYHHAHDAYLNAVVGTALIKKYPKLESEFVYGDYKVYDVRKMIAKSEQEIGKATAKYFFYSNIMNFFKTEITLAMNHRVEITEGILADECAALLCYFFRMPRQVFNAQKKAQSSTDGSSGSETPGTSESATPESSGSEVEFSHEYWMRHALTLAKRARDEREVPVGAVLVLNNRVIGEGWNRAIGLHDPTAHAEIMALRQGGLVMQNYRLIDATLYVTFEPCVMCAGAMIHSRIGRVVFGVRNAKTGAAGSLMDVLHYPGNGEIRKRPLIETNGETGEIVWDKGRDFATVRKVLSMPQVNIVKKTEVQTGGFSKESILPKRNSDKLIARKKDWDPKKYGGFDSPTVAYSVLVVAKVEKGKSKKLKSVKELLGITIMERSSFEKNPIDFLEAKGYKEVKKDLIIKLPKYSLFELENGRKRMLASAGELQKGNELALPSKYVNFLYLASHYEKLKGSPEDNEQKQLFVEQHKHYLDEIIEQISEFSKRVILADANLDKVLSAYNKHRDKPIREQAENIIHLFTLTNLGAPAAFKYFDTTIDRKRYTSTKEVLDATLIHQSITGLYETRIDLSQLGGD

SEQ ID NO: 298 - protein, 1554 aa, synthetic construct
  REGION 1..1554: note = 122 Cas9 TadACP136ins 1041 polypeptide sequence
MDKKYSIGLAIGTNSVGWAVITDEYKVPSKKFKVLGNTDRHSIKKNLIGALLFDSGETAEATRLKRTARRRYTRRKNRICYLQEIFSNEMAKVDDSFFHRLEESFLVEEDKKHERHPIFGNIVDEVAYHEKYPTIYHLRKKLVDSTDKADLRLIYLALAHMIKFRGHFLIEGDLNPDNSDVDKLFIQLVQTYNQLFEENPINASGVDAKAILSARLSKSRRLENLIAQLPGEKKNGLFGNLIALSLGLTPNFKSNFDLAEDAKLQLSKDTYDDDLDNLLAQIGDQYADLFLAAKNLSDAILLSDILRVNTEITKAPLSASMIKRYDEHHQDLTLLKALVRQQLPEKYKEIFFDQSKNGYAGYIDGGASQEEFYKFIKPILEKMDGTEELLVKLNREDLLRKQRTFDNGSIPHQIHLGELHAILRRQEDFYPFLKDNREKIEKILTFRIPYYVGPLARGNSRFAWMTRKSEETITPWNFEEVVDKGASAQSFIERMTNFDKNLPNEKVLPKHSLLYEYFTVYNELTKVKYVTEGMRKPAFLSGEQKKAIVDLLFKTNRKVTVKQLKEDYFKKIECFDSVEISGVEDRFNASLGTYHDLLKIIKDKDFLDNEENEDILEDIVLTLTLFEDREMIEERLKTYAHLFDDKVMKQLKRRRYTGWGRLSRKLINGIRDKQSGKTILDFLKSDGFANRNFMQLIHDDSLTFKEDIQKAQVSGQGDSLHEHIANLAGSPAIKKGILQTVKVVDELVKVMGRHKPENIVIEMARENQTTQKGQKNSRERMKRIEEGIKELGSQILKEHPVENTQLQNEKLYLYYLQNGRDMYVDQELDINRLSDYDVDHIVPQSFLKDDSIDNKVLTRSDKNRGKSDNVPSEEVVKKMKNYWRQLLNAKLITQRKFDNLTKAERGGLSELDKAGFIKRQLVETRQITKHVAQILDSRMNTKYDENDKLIREVKVITLKSKLVSDFRKDFQFYKVREINNYHHAHDAYLNAVVGTALIKKYPKLESEFVYGDYKVYDVRKMIAKSEQEIGKATAKYFFYSMNHRVEITEGILADECAALLCYFFRMPRQVFNAQKKAQSSTDGSSGSETPGTSESATPESSGSEVEFSHEYWMRHALTLAKRARDEREVPVGAVLVLNNRVIGEGWNRAIGLHDPTAHAEIMALRQGGLVMQNYRLIDATLYVTFEPCVMCAGAMIHSRIGRVVFGVRNAKTGAAGSLMDVLHYPGNIMNFFKTEITLANGEIRKRPLIETNGETGEIVWDKGRDFATVRKVLSMPQVNIVKKTEVQTGGFSKESILPKRNSDKLIARKKDWDPKKYGGFDSPTVAYSVLVVAKVEKGKSKKLKSVKELLGITIMERSSFEKNPIDFLEAKGYKEVKKDLIIKLPKYSLFELENGRKRMLASAGELQKGNELALPSKYVNFLYLASHYEKLKGSPEDNEQKQLFVEQHKHYLDEIIEQISEFSKRVILADANLDKVLSAYNKHRDKPIREQAENIIHLFTLTNLGAPAAFKYFDTTIDRKRYTSTKEVLDATLIHQSITGLYETRIDLSQLGGD

SEQ ID NO: 299 - protein, 1554 aa, synthetic construct
  REGION 1..1554: note = 123 Cas9 TadACP139ins 1299 polypeptide sequence
MDKKYSIGLAIGTNSVGWAVITDEYKVPSKKFKVLGNTDRHSIKKNLIGALLFDSGETAEATRLKRTARRRYTRRKNRICYLQEIFSNEMAKVDDSFFHRLEESFLVEEDKKHERHPIFGNIVDEVAYHEKYPTIYHLRKKLVDSTDKADLRLIYLALAHMIKFRGHFLIEGDLNPDNSDVDKLFIQLVQTYNQLFEENPINASGVDAKAILSARLSKSRRLENLIAQLPGEKKNGLFGNLIALSLGLTPNFKSNFDLAEDAKLQLSKDTYDDDLDNLLAQIGDQYADLFLAAKNLSDAILLSDILRVNTEITKAPLSASMIKRYDEHHQDLTLLKALVRQQLPEKYKEIFFDQSKNGYAGYIDGGASQEEFYKFIKPILEKMDGTEELLVKLNREDLLRKQRTFDNGSIPHQIHLGELHAILRRQEDFYPFLKDNREKIEKILTFRIPYYVGPLARGNSRFAWMTRKSEETITPWNFEEVVDKGASAQSFIERMTNFDKNLPNEKVLPKHSLLYEYFTVYNELTKVKYVTEGMRKPAFLSGEQKKAIVDLLFKTNRKVTVKQLKEDYFKKIECFDSVEISGVEDRFNASLGTYHDLLKIIKDKDFLDNEENEDILEDIVLTLTLFEDREMIEERLKTYAHLFDDKVMKQLKRRRYTGWGRLSRKLINGIRDKQSGKTILDFLKSDGFANRNFMQLIHDDSLTFKEDIQKAQVSGQGDSLHEHIANLAGSPAIKKGILQTVKVVDELVKVMGRHKPENIVIEMARENQTTQKGQKNSRERMKRIEEGIKELGSQILKEHPVENTQLQNEKLYLYYLQNGRDMYVDQELDINRLSDYDVDHIVPQSFLKDDSIDNKVLTRSDKNRGKSDNVPSEEVVKKMKNYWRQLLNAKLITQRKFDNLTKAERGGLSELDKAGFIKRQLVETRQITKHVAQILDSRMNTKYDENDKLIREVKVITLKSKLVSDFRKDFQFYKVREINNYHHAHDAYLNAVVGTALIKKYPKLESEFVYGDYKVYDVRKMIAKSEQEIGKATAKYFFYSNIMNFFKTEITLANGEIRKRPLIETNGETGEIVWDKGRDFATVRKVLSMPQVNIVKKTEVQTGGFSKESILPKRNSDKLIARKKDWDPKKYGGFDSPTVAYSVLVVAKVEKGKSKKLKSVKELLGITIMERSSFEKNPIDFLEAKGYKEVKKDLIIKLPKYSLFELENGRKRMLASAGELQKGNELALPSKYVNFLYLASHYEKLKGSPEDNEQKQLFVEQHKHYLDEIIEQISEFSKRVILADANLDKVLSAYNKHRMNHRVEITEGILADECAALLCYFFRMPRQVFNAQKKAQSSTDGSSGSETPGTSESATPESSGSEVEFSHEYWMRHALTLAKRARDEREVPVGAVLVLNNRVIGEGWNRAIGLHDPTAHAEIMALRQGGLVMQNYRLIDATLYVTFEPCVMCAGAMIHSRIGRVVFGVRNAKTGAAGSLMDVLHYPGDKPIREQAENIIHLFTLTNLGAPAAFKYFDTTIDRKRYTSTKEVLDATLIHQSITGLYETRIDLSQLGGD

SEQ ID NO: 300 - protein, 1454 aa, synthetic construct
  REGION 1..1454: note = 124 Cas9 delta 792-872TadAins polypeptide sequence
MDKKYSIGLAIGTNSVGWAVITDEYKVPSKKFKVLGNTDRHSIKKNLIGALLFDSGETAEATRLKRTARRRYTRRKNRICYLQEIFSNEMAKVDDSFFHRLEESFLVEEDKKHERHPIFGNIVDEVAYHEKYPTIYHLRKKLVDSTDKADLRLIYLALAHMIKFRGHFLIEGDLNPDNSDVDKLFIQLVQTYNQLFEENPINASGVDAKAILSARLSKSRRLENLIAQLPGEKKNGLFGNLIALSLGLTPNFKSNFDLAEDAKLQLSKDTYDDDLDNLLAQIGDQYADLFLAAKNLSDAILLSDILRVNTEITKAPLSASMIKRYDEHHQDLTLLKALVRQQLPEKYKEIFFDQSKNGYAGYIDGGASQEEFYKFIKPILEKMDGTEELLVKLNREDLLRKQRTFDNGSIPHQIHLGELHAILRRQEDFYPFLKDNREKIEKILTFRIPYYVGPLARGNSRFAWMTRKSEETITPWNFEEVVDKGASAQSFIERMTNFDKNLPNEKVLPKHSLLYEYFTVYNELTKVKYVTEGMRKPAFLSGEQKKAIVDLLFKTNRKVTVKQLKEDYFKKIECFDSVEISGVEDRFNASLGTYHDLLKIIKDKDFLDNEENEDILEDIVLTLTLFEDREMIEERLKTYAHLFDDKVMKQLKRRRYTGWGRLSRKLINGIRDKQSGKTILDFLKSDGFANRNFMQLIHDDSLTFKEDIQKAQVSGQGDSLHEHIANLAGSPAIKKGILQTVKVVDELVKVMGRHKPENIVIEMARENQTTQKGQKNSRERMKRIEEGIKELGSEVEFSHEYWMRHALTLAKRARDEREVPVGAVLVLNNRVIGEGWNRAIGLHDPTAHAEIMALRQGGLVMQNYRLIDATLYVTFEPCVMCAGAMIHSRIGRVVFGVRNAKTGAAGSLMDVLHYPGMNHRVEITEGILADECAALLCYFFRMPRQVFNAQKKAQSSTDEEVVKKMKNYWRQLLNAKLITQRKFDNLTKAERGGLSELDKAGFIKRQLVETRQITKHVAQILDSRMNTKYDENDKLIREVKVITLKSKLVSDFRKDFQFYKVREINNYHHAHDAYLNAVVGTALIKKYPKLESEFVYGDYKVYDVRKMIAKSEQEIGKATAKYFFYSNIMNFFKTEITLANGEIRKRPLIETNGETGEIVWDKGRDFATVRKVLSMPQVNIVKKTEVQTGGFSKESILPKRNSDKLIARKKDWDPKKYGGFDSPTVAYSVLVVAKVEKGKSKKLKSVKELLGITIMERSSFEKNPIDFLEAKGYKEVKKDLIIKLPKYSLFELENGRKRMLASAGELQKGNELALPSKYVNFLYLASHYEKLKGSPEDNEQKQLFVEQHKHYLDEIIEQISEFSKRVILADANLDKVLSAYNKHRDKPIREQAENIIHLFTLTNLGAPAAFKYFDTTIDRKRYTSTKEVLDATLIHQSITGLYETRIDLSQLGGD

SEQ ID NO: 301 - protein, 1420 aa, synthetic construct
  REGION 1..1420: note = 125 Cas9 delta 792-906TadAins polypeptide sequence
MDKKYSIGLAIGTNSVGWAVITDEYKVPSKKFKVLGNTDRHSIKKNLIGALLFDSGETAEATRLKRTARRRYTRRKNRICYLQEIFSNEMAKVDDSFFHRLEESFLVEEDKKHERHPIFGNIVDEVAYHEKYPTIYHLRKKLVDSTDKADLRLIYLALAHMIKFRGHFLIEGDLNPDNSDVDKLFIQLVQTYNQLFEENPINASGVDAKAILSARLSKSRRLENLIAQLPGEKKNGLFGNLIALSLGLTPNFKSNFDLAEDAKLQLSKDTYDDDLDNLLAQIGDQYADLFLAAKNLSDAILLSDILRVNTEITKAPLSASMIKRYDEHHQDLTLLKALVRQQLPEKYKEIFFDQSKNGYAGYIDGGASQEEFYKFIKPILEKMDGTEELLVKLNREDLLRKQRTFDNGSIPHQIHLGELHAILRRQEDFYPFLKDNREKIEKILTFRIPYYVGPLARGNSRFAWMTRKSEETITPWNFEEVVDKGASAQSFIERMTNFDKNLPNEKVLPKHSLLYEYFTVYNELTKVKYVTEGMRKPAFLSGEQKKAIVDLLFKTNRKVTVKQLKEDYFKKIECFDSVEISGVEDRFNASLGTYHDLLKIIKDKDFLDNEENEDILEDIVLTLTLFEDREMIEERLKTYAHLFDDKVMKQLKRRRYTGWGRLSRKLINGIRDKQSGKTILDFLKSDGFANRNFMQLIHDDSLTFKEDIQKAQVSGQGDSLHEHIANLAGSPAIKKGILQTVKVVDELVKVMGRHKPENIVIEMARENQTTQKGQKNSRERMKRIEEGIKELGSEVEFSHEYWMRHALTLAKRARDEREVPVGAVLVLNNRVIGEGWNRAIGLHDPTAHAEIMALRQGGLVMQNYRLIDATLYVTFEPCVMCAGAMIHSRIGRVVFGVRNAKTGAAGSLMDVLHYPGMNHRVEITEGILADECAALLCYFFRMPRQVFNAQKKAQSSTDGLSELDKAGFIKRQLVETRQITKHVAQILDSRMNTKYDENDKLIREVKVITLKSKLVSDFRKDFQFYKVREINNYHHAHDAYLNAVVGTALIKKYPKLESEFVYGDYKVYDVRKMIAKSEQEIGKATAKYFFYSNIMNFFKTEITLANGEIRKRPLIETNGETGEIVWDKGRDFATVRKVLSMPQVNIVKKTEVQTGGFSKESILPKRNSDKLIARKKDWDPKKYGGFDSPTVAYSVLVVAKVEKGKSKKLKSVKELLGITIMERSSFEKNPIDFLEAKGYKEVKKDLIIKLPKYSLFELENGRKRMLASAGELQKGNELALPSKYVNFLYLASHYEKLKGSPEDNEQKQLFVEQHKHYLDEIIEQISEFSKRVILADANLDKVLSAYNKHRDKPIREQAENIIHLFTLTNLGAPAAFKYFDTTIDRKRYTSTKEVLDATLIHQSITGLYETRIDLSQLGGD

SEQ ID NO: 302 - protein, 1554 aa, synthetic construct
  REGION 1..1554: note = 126 TadA CP65ins 1003 polypeptide sequence
MDKKYSIGLAIGTNSVGWAVITDEYKVPSKKFKVLGNTDRHSIKKNLIGALLFDSGETAEATRLKRTARRRYTRRKNRICYLQEIFSNEMAKVDDSFFHRLEESFLVEEDKKHERHPIFGNIVDEVAYHEKYPTIYHLRKKLVDSTDKADLRLIYLALAHMIKFRGHFLIEGDLNPDNSDVDKLFIQLVQTYNQLFEENPINASGVDAKAILSARLSKSRRLENLIAQLPGEKKNGLFGNLIALSLGLTPNFKSNFDLAEDAKLQLSKDTYDDDLDNLLAQIGDQYADLFLAAKNLSDAILLSDILRVNTEITKAPLSASMIKRYDEHHQDLTLLKALVRQQLPEKYKEIFFDQSKNGYAGYIDGGASQEEFYKFIKPILEKMDGTEELLVKLNREDLLRKQRTFDNGSIPHQIHLGELHAILRRQEDFYPFLKDNREKIEKILTFRIPYYVGPLARGNSRFAWMTRKSEETITPWNFEEVVDKGASAQSFIERMTNFDKNLPNEKVLPKHSLLYEYFTVYNELTKVKYVTEGMRKPAFLSGEQKKAIVDLLFKTNRKVTVKQLKEDYFKKIECFDSVEISGVEDRFNASLGTYHDLLKIIKDKDFLDNEENEDILEDIVLTLTLFEDREMIEERLKTYAHLFDDKVMKQLKRRRYTGWGRLSRKLINGIRDKQSGKTILDFLKSDGFANRNFMQLIHDDSLTFKEDIQKAQVSGQGDSLHEHIANLAGSPAIKKGILQTVKVVDELVKVMGRHKPENIVIEMARENQTTQKGQKNSRERMKRIEEGIKELGSQILKEHPVENTQLQNEKLYLYYLQNGRDMYVDQELDINRLSDYDVDHIVPQSFLKDDSIDNKVLTRSDKNRGKSDNVPSEEVVKKMKNYWRQLLNAKLITQRKFDNLTKAERGGLSELDKAGFIKRQLVETRQITKHVAQILDSRMNTKYDENDKLIREVKVITLKSKLVSDFRKDFQFYKVREINNYHHAHDAYLNAVVGTALIKKYPKTAHAEIMALRQGGLVMQNYRLIDATLYVTFEPCVMCAGAMIHSRIGRVVFGVRNAKTGAAGSLMDVLHYPGMNHRVEITEGILADECAALLCYFFRMPRQVFNAQKKAQSSTDGSSGSETPGTSESATPESSGSEVEFSHEYWMRHALTLAKRARDEREVPVGAVLVLNNRVIGEGWNRAIGLHDPLESEFVYGDYKVYDVRKMIAKSEQEIGKATAKYFFYSNIMNFFKTEITLANGEIRKRPLIETNGETGEIVWDKGRDFATVRKVLSMPQVNIVKKTEVQTGGFSKESILPKRNSDKLIARKKDWDPKKYGGFDSPTVAYSVLVVAKVEKGKSKKLKSVKELLGITIMERSSFEKNPIDFLEAKGYKEVKKDLIIKLPKYSLFELENGRKRMLASAGELQKGNELALPSKYVNFLYLASHYEKLKGSPEDNEQKQLFVEQHKHYLDEIIEQISEFSKRVILADANLDKVLSAYNKHRDKPIREQAENIIHLFTLTNLGAPAAFKYFDTTIDRKRYTSTKEVLDATLIHQSITGLYETRIDLSQLGGD

SEQ ID NO: 303 - protein, 1554 aa, synthetic construct
  REGION 1..1554: note = 127 TadA CP65ins 1016 polypeptide sequence
MDKKYSIGLAIGTNSVGWAVITDEYKVPSKKFKVLGNTDRHSIKKNLIGALLFDSGETAEATRLKRTARRRYTRRKNRICYLQEIFSNEMAKVDDSFFHRLEESFLVEEDKKHERHPIFGNIVDEVAYHEKYPTIYHLRKKLVDSTDKADLRLIYLALAHMIKFRGHFLIEGDLNPDNSDVDKLFIQLVQTYNQLFEENPINASGVDAKAILSARLSKSRRLENLIAQLPGEKKNGLFGNLIALSLGLTPNFKSNFDLAEDAKLQLSKDTYDDDLDNLLAQIGDQYADLFLAAKNLSDAILLSDILRVNTEITKAPLSASMIKRYDEHHQDLTLLKALVRQQLPEKYKEIFFDQSKNGYAGYIDGGASQEEFYKFIKPILEKMDGTEELLVKLNREDLLRKQRTFDNGSIPHQIHLGELHAILRRQEDFYPFLKDNREKIEKILTFRIPYYVGPLARGNSRFAWMTRKSEETITPWNFEEVVDKGASAQSFIERMTNFDKNLPNEKVLPKHSLLYEYFTVYNELTKVKYVTEGMRKPAFLSGEQKKAIVDLLFKTNRKVTVKQLKEDYFKKIECFDSVEISGVEDRFNASLGTYHDLLKIIKDKDFLDNEENEDILEDIVLTLTLFEDREMIEERLKTYAHLFDDKVMKQLKRRRYTGWGRLSRKLINGIRDKQSGKTILDFLKSDGFANRNFMQLIHDDSLTFKEDIQKAQVSGQGDSLHEHIANLAGSPAIKKGILQTVKVVDELVKVMGRHKPENIVIEMARENQTTQKGQKNSRERMKRIEEGIKELGSQILKEHPVENTQLQNEKLYLYYLQNGRDMYVDQELDINRLSDYDVDHIVPQSFLKDDSIDNKVLTRSDKNRGKSDNVPSEEVVKKMKNYWRQLLNAKLITQRKFDNLTKAERGGLSELDKAGFIKRQLVETRQITKHVAQILDSRMNTKYDENDKLIREVKVITLKSKLVSDFRKDFQFYKVREINNYHHAHDAYLNAVVGTALIKKYPKLESEFVYGDYKVTAHAEIMALRQGGLVMQNYRLIDATLYVTFEPCVMCAGAMIHSRIGRVVFGVRNAKTGAAGSLMDVLHYPGMNHRVEITEGILADECAALLCYFFRMPRQVFNAQKKAQSSTDGSSGSETPGTSESATPESSGSEVEFSHEYWMRHALTLAKRARDEREVPVGAVLVLNNRVIGEGWNRAIGLHDPYDVRKMIAKSEQEIGKATAKYFFYSNIMNFFKTEITLANGEIRKRPLIETNGETGEIVWDKGRDFATVRKVLSMPQVNIVKKTEVQTGGFSKESILPKRNSDKLIARKKDWDPKKYGGFDSPTVAYSVLVVAKVEKGKSKKLKSVKELLGITIMERSSFEKNPIDFLEAKGYKEVKKDLIIKLPKYSLFELENGRKRMLASAGELQKGNELALPSKYVNFLYLASHYEKLKGSPEDNEQKQLFVEQHKHYLDEIIEQISEFSKRVILADANLDKVLSAYNKHRDKPIREQAENIIHLFTLTNLGAPAAFKYFDTTIDRKRYTSTKEVLDATLIHQSITGLYETRIDLSQLGGD

SEQ ID NO: 304 - protein, 1554 aa, synthetic construct
  REGION 1..1554: note = 128 TadA CP65ins 1022 polypeptide sequence
MDKKYSIGLAIGTNSVGWAVITDEYKVPSKKFKVLGNTDRHSIKKNLIGALLFDSGETAEATRLKRTARRRYTRRKNRICYLQEIFSNEMAKVDDSFFHRLEESFLVEEDKKHERHPIFGNIVDEVAYHEKYPTIYHLRKKLVDSTDKADLRLIYLALAHMIKFRGHFLIEGDLNPDNSDVDKLFIQLVQTYNQLFEENPINASGVDAKAILSARLSKSRRLENLIAQLPGEKKNGLFGNLIALSLGLTPNFKSNFDLAEDAKLQLSKDTYDDDLDNLLAQIGDQYADLFLAAKNLSDAILLSDILRVNTEITKAPLSASMIKRYDEHHQDLTLLKALVRQQLPEKYKEIFFDQSKNGYAGYIDGGASQEEFYKFIKPILEKMDGTEELLVKLNREDLLRKQRTFDNGSIPHQIHLGELHAILRRQEDFYPFLKDNREKIEKILTFRIPYYVGPLARGNSRFAWMTRKSEETITPWNFEEVVDKGASAQSFIERMTNFDKNLPNEKVLPKHSLLYEYFTVYNELTKVKYVTEGMRKPAFLSGEQKKAIVDLLFKTNRKVTVKQLKEDYFKKIECFDSVEISGVEDRFNASLGTYHDLLKIIKDKDFLDNEENEDILEDIVLTLTLFEDREMIEERLKTYAHLFDDKVMKQLKRRRYTGWGRLSRKLINGIRDKQSGKTILDFLKSDGFANRNFMQLIHDDSLTFKEDIQKAQVSGQGDSLHEHIANLAGSPAIKKGILQTVKVVDELVKVMGRHKPENIVIEMARENQTTQKGQKNSRERMKRIEEGIKELGSQILKEHPVENTQLQNEKLYLYYLQNGRDMYVDQELDINRLSDYDVDHIVPQSFLKDDSIDNKVLTRSDKNRGKSDNVPSEEVVKKMKNYWRQLLNAKLITQRKFDNLTKAERGGLSELDKAGFIKRQLVETRQITKHVAQILDSRMNTKYDENDKLIREVKVITLKSKLVSDFRKDFQFYKVREINNYHHAHDAYLNAVVGTALIKKYPKLESEFVYGDYKVYDVRKMITAHAEIMALRQGGLVMQNYRLIDATLYVTFEPCVMCAGAMIHSRIGRVVFGVRNAKTGAAGSLMDVLHYPGMNHRVEITEGILADECAALLCYFFRMPRQVFNAQKKAQSSTDGSSGSETPGTSESATPESSGSEVEFSHEYWMRHALTLAKRARDEREVPVGAVLVLNNRVIGEGWNRAIGLHDPAKSEQEIGKATAKYFFYSNIMNFFKTEITLANGEIRKRPLIETNGETGEIVWDKGRDFATVRKVLSMPQVNIVKKTEVQTGGFSKESILPKRNSDKLIARKKDWDPKKYGGFDSPTVAYSVLVVAKVEKGKSKKLKSVKELLGITIMERSSFEKNPIDFLEAKGYKEVKKDLIIKLPKYSLFELENGRKRMLASAGELQKGNELALPSKYVNFLYLASHYEKLKGSPEDNEQKQLFVEQHKHYLDEIIEQISEFSKRVILADANLDKVLSAYNKHRDKPIREQAENIIHLFTLTNLGAPAAFKYFDTTIDRKRYTSTKEVLDATLIHQSITGLYETRIDLSQLGGD

SEQ ID NO: 305 - protein, 1554 aa, synthetic construct
  REGION 1..1554: note = 129 TadA CP65ins 1029 polypeptide sequence
MDKKYSIGLAIGTNSVGWAVITDEYKVPSKKFKVLGNTDRHSIKKNLIGALLFDSGETAEATRLKRTARRRYTRRKNRICYLQEIFSNEMAKVDDSFFHRLEESFLVEEDKKHERHPIFGNIVDEVAYHEKYPTIYHLRKKLVDSTDKADLRLIYLALAHMIKFRGHFLIEGDLNPDNSDVDKLFIQLVQTYNQLFEENPINASGVDAKAILSARLSKSRRLENLIAQLPGEKKNGLFGNLIALSLGLTPNFKSNFDLAEDAKLQLSKDTYDDDLDNLLAQIGDQYADLFLAAKNLSDAILLSDILRVNTEITKAPLSASMIKRYDEHHQDLTLLKALVRQQLPEKYKEIFFDQSKNGYAGYIDGGASQEEFYKFIKPILEKMDGTEELLVKLNREDLLRKQRTFDNGSIPHQIHLGELHAILRRQEDFYPFLKDNREKIEKILTFRIPYYVGPLARGNSRFAWMTRKSEETITPWNFEEVVDKGASAQSFIERMTNFDKNLPNEKVLPKHSLLYEYFTVYNELTKVKYVTEGMRKPAFLSGEQKKAIVDLLFKTNRKVTVKQLKEDYFKKIECFDSVEISGVEDRFNASLGTYHDLLKIIKDKDFLDNEENEDILEDIVLTLTLFEDREMIEERLKTYAHLFDDKVMKQLKRRRYTGWGRLSRKLINGIRDKQSGKTILDFLKSDGFANRNFMQLIHDDSLTFKEDIQKAQVSGQGDSLHEHIANLAGSPAIKKGILQTVKVVDELVKVMGRHKPENIVIEMARENQTTQKGQKNSRERMKRIEEGIKELGSQILKEHPVENTQLQNEKLYLYYLQNGRDMYVDQELDINRLSDYDVDHIVPQSFLKDDSIDNKVLTRSDKNRGKSDNVPSEEVVKKMKNYWRQLLNAKLITQRKFDNLTKAERGGLSELDKAGFIKRQLVETRQITKHVAQILDSRMNTKYDENDKLIREVKVITLKSKLVSDFRKDFQFYKVREINNYHHAHDAYLNAVVGTALIKKYPKLESEFVYGDYKVYDVRKMIAKSEQEITAHAEIMALRQGGLVMQNYRLIDATLYVTFEPCVMCAGAMIHSRIGRVVFGVRNAKTGAAGSLMDVLHYPGMNHRVEITEGILADECAALLCYFFRMPRQVFNAQKKAQSSTDGSSGSETPGTSESATPESSGSEVEFSHEYWMRHALTLAKRARDEREVPVGAVLVLNNRVIGEGWNRAIGLHDPGKATAKYFFYSNIMNFFKTEITLANGEIRKRPLIETNGETGEIVWDKGRDFATVRKVLSMPQVNIVKKTEVQTGGFSKESILPKRNSDKLIARKKDWDPKKYGGFDSPTVAYSVLVVAKVEKGKSKKLKSVKELLGITIMERSSFEKNPIDFLEAKGYKEVKKDLIIKLPKYSLFELENGRKRMLASAGELQKGNELALPSKYVNFLYLASHYEKLKGSPEDNEQKQLFVEQHKHYLDEIIEQISEFSKRVILADANLDKVLSAYNKHRDKPIREQAENIIHLFTLTNLGAPAAFKYFDTTIDRKRYTSTKEVLDATLIHQSITGLYETRIDLSQLGGD

SEQ ID NO: 306 - protein, 1554 aa, synthetic construct
  REGION 1..1554: note = 130 TadA CP65ins 1041 polypeptide sequence
MDKKYSIGLAIGTNSVGWAVITDEYKVPSKKFKVLGNTDRHSIKKNLIGALLFDSGETAEATRLKRTARRRYTRRKNRICYLQEIFSNEMAKVDDSFFHRLEESFLVEEDKKHERHPIFGNIVDEVAYHEKYPTIYHLRKKLVDSTDKADLRLIYLALAHMIKFRGHFLIEGDLNPDNSDVDKLFIQLVQTYNQLFEENPINASGVDAKAILSARLSKSRRLENLIAQLPGEKKNGLFGNLIALSLGLTPNFKSNFDLAEDAKLQLSKDTYDDDLDNLLAQIGDQYADLFLAAKNLSDAILLSDILRVNTEITKAPLSASMIKRYDEHHQDLTLLKALVRQQLPEKYKEIFFDQSKNGYAGYIDGGASQEEFYKFIKPILEKMDGTEELLVKLNREDLLRKQRTFDNGSIPHQIHLGELHAILRRQEDFYPFLKDNREKIEKILTFRIPYYVGPLARGNSRFAWMTRKSEETITPWNFEEVVDKGASAQSFIERMTNFDKNLPNEKVLPKHSLLYEYFTVYNELTKVKYVTEGMRKPAFLSGEQKKAIVDLLFKTNRKVTVKQLKEDYFKKIECFDSVEISGVEDRFNASLGTYHDLLKIIKDKDFLDNEENEDILEDIVLTLTLFEDREMIEERLKTYAHLFDDKVMKQLKRRRYTGWGRLSRKLINGIRDKQSGKTILDFLKSDGFANRNFMQLIHDDSLTFKEDIQKAQVSGQGDSLHEHIANLAGSPAIKKGILQTVKVVDELVKVMGRHKPENIVIEMARENQTTQKGQKNSRERMKRIEEGIKELGSQILKEHPVENTQLQNEKLYLYYLQNGRDMYVDQELDINRLSDYDVDHIVPQSFLKDDSIDNKVLTRSDKNRGKSDNVPSEEVVKKMKNYWRQLLNAKLITQRKFDNLTKAERGGLSELDKAGFIKRQLVETRQITKHVAQILDSRMNTKYDENDKLIREVKVITLKSKLVSDFRKDFQFYKVREINNYHHAHDAYLNAVVGTALIKKYPKLESEFVYGDYKVYDVRKMIAKSEQEIGKATAKYFFYSTAHAEIMALRQGGLVMQNYRLIDATLYVTFEPCVMCAGAMIHSRIGRVVFGVRNAKTGAAGSLMDVLHYPGMNHRVEITEGILADECAALLCYFFRMPRQVFNAQKKAQSSTDGSSGSETPGTSESATPESSGSEVEFSHEYWMRHALTLAKRARDEREVPVGAVLVLNNRVIGEGWNRAIGLHDPNIMNFFKTEITLANGEIRKRPLIETNGETGEIVWDKGRDFATVRKVLSMPQVNIVKKTEVQTGGFSKESILPKRNSDKLIARKKDWDPKKYGGFDSPTVAYSVLVVAKVEKGKSKKLKSVKELLGITIMERSSFEKNPIDFLEAKGYKEVKKDLIIKLPKYSLFELENGRKRMLASAGELQKGNELALPSKYVNFLYLASHYEKLKGSPEDNEQKQLFVEQHKHYLDEIIEQISEFSKRVILADANLDKVLSAYNKHRDKPIREQAENIIHLFTLTNLGAPAAFKYFDTTIDRKRYTSTKEVLDATLIHQSITGLYETRIDLSQLGGD

SEQ ID NO: 307 - protein, 1554 aa, synthetic construct
  REGION 1..1554: note = 131 TadA CP65ins 1054 polypeptide sequence
MDKKYSIGLAIGTNSVGWAVITDEYKVPSKKFKVLGNTDRHSIKKNLIGALLFDSGETAEATRLKRTARRRYTRRKNRICYLQEIFSNEMAKVDDSFFHRLEESFLVEEDKKHERHPIFGNIVDEVAYHEKYPTIYHLRKKLVDSTDKADLRLIYLALAHMIKFRGHFLIEGDLNPDNSDVDKLFIQLVQTYNQLFEENPINASGVDAKAILSARLSKSRRLENLIAQLPGEKKNGLFGNLIALSLGLTPNFKSNFDLAEDAKLQLSKDTYDDDLDNLLAQIGDQYADLFLAAKNLSDAILLSDILRVNTEITKAPLSASMIKRYDEHHQDLTLLKALVRQQLPEKYKEIFFDQSKNGYAGYIDGGASQEEFYKFIKPILEKMDGTEELLVKLNREDLLRKQRTFDNGSIPHQIHLGELHAILRRQEDFYPFLKDNREKIEKILTFRIPYYVGPLARGNSRFAWMTRKSEETITPWNFEEVVDKGASAQSFIERMTNFDKNLPNEKVLPKHSLLYEYFTVYNELTKVKYVTEGMRKPAFLSGEQKKAIVDLLFKTNRKVTVKQLKEDYFKKIECFDSVEISGVEDRFNASLGTYHDLLKIIKDKDFLDNEENEDILEDIVLTLTLFEDREMIEERLKTYAHLFDDKVMKQLKRRRYTGWGRLSRKLINGIRDKQSGKTILDFLKSDGFANRNFMQLIHDDSLTFKEDIQKAQVSGQGDSLHEHIANLAGSPAIKKGILQTVKVVDELVKVMGRHKPENIVIEMARENQTTQKGQKNSRERMKRIEEGIKELGSQILKEHPVENTQLQNEKLYLYYLQNGRDMYVDQELDINRLSDYDVDHIVPQSFLKDDSIDNKVLTRSDKNRGKSDNVPSEEVVKKMKNYWRQLLNAKLITQRKFDNLTKAERGGLSELDKAGFIKRQLVETRQITKHVAQILDSRMNTKYDENDKLIREVKVITLKSKLVSDFRKDFQFYKVREINNYHHAHDAYLNAVVGTALIKKYPKLESEFVYGDYKVYDVRKMIAKSEQEIGKATAKYFFYSNIMNFFKTEITLANTAHAEIMALRQGGLVMQNYRLIDATLYVTFEPCVMCAGAMIHSRIGRVVFGVRNAKTGAAGSLMDVLHYPGMNHRVEITEGILADECAALLCYFFRMPRQVFNAQKKAQSSTDGSSGSETPGTSESATPESSGSEVEFSHEYWMRHALTLAKRARDEREVPVGAVLVLNNRVIGEGWNRAIGLHDPGEIRKRPLIETNGETGEIVWDKGRDFATVRKVLSMPQVNIVKKTEVQTGGFSKESILPKRNSDKLIARKKDWDPKKYGGFDSPTVAYSVLVVAKVEKGKSKKLKSVKELLGITIMERSSFEKNPIDFLEAKGYKEVKKDLIIKLPKYSLFELENGRKRMLASAGELQKGNELALPSKYVNFLYLASHYEKLKGSPEDNEQKQLFVEQHKHYLDEIIEQISEFSKRVILADANLDKVLSAYNKHRDKPIREQAENIIHLFTLTNLGAPAAFKYFDTTIDRKRYTSTKEVLDATLIHQSITGLYETRIDLSQLGGD

SEQ ID NO: 308 - protein, 1554 aa, synthetic construct
  REGION 1..1554: note = 132 TadA CP65ins 1246 polypeptide sequence
MDKKYSIGLAIGTNSVGWAVITDEYKVPSKKFKVLGNTDRHSIKKNLIGALLFDSGETAEATRLKRTARRRYTRRKNRICYLQEIFSNEMAKVDDSFFHRLEESFLVEEDKKHERHPIFGNIVDEVAYHEKYPTIYHLRKKLVDSTDKADLRLIYLALAHMIKFRGHFLIEGDLNPDNSDVDKLFIQLVQTYNQLFEENPINASGVDAKAILSARLSKSRRLENLIAQLPGEKKNGLFGNLIALSLGLTPNFKSNFDLAEDAKLQLSKDTYDDDLDNLLAQIGDQYADLFLAAKNLSDAILLSDILRVNTEITKAPLSASMIKRYDEHHQDLTLLKALVRQQLPEKYKEIFFDQSKNGYAGYIDGGASQEEFYKFIKPILEKMDGTEELLVKLNREDLLRKQRTFDNGSIPHQIHLGELHAILRRQEDFYPFLKDNREKIEKILTFRIPYYVGPLARGNSRFAWMTRKSEETITPWNFEEVVDKGASAQSFIERMTNFDKNLPNEKVLPKHSLLYEYFTVYNELTKVKYVTEGMRKPAFLSGEQKKAIVDLLFKTNRKVTVKQLKEDYFKKIECFDSVEISGVEDRFNASLGTYHDLLKIIKDKDFLDNEENEDILEDIVLTLTLFEDREMIEERLKTYAHLFDDKVMKQLKRRRYTGWGRLSRKLINGIRDKQSGKTILDFLKSDGFANRNFMQLIHDDSLTFKEDIQKAQVSGQGDSLHEHIANLAGSPAIKKGILQTVKVVDELVKVMGRHKPENIVIEMARENQTTQKGQKNSRERMKRIEEGIKELGSQILKEHPVENTQLQNEKLYLYYLQNGRDMYVDQELDINRLSDYDVDHIVPQSFLKDDSIDNKVLTRSDKNRGKSDNVPSEEVVKKMKNYWRQLLNAKLITQRKFDNLTKAERGGLSELDKAGFIKRQLVETRQITKHVAQILDSRMNTKYDENDKLIREVKVITLKSKLVSDFRKDFQFYKVREINNYHHAHDAYLNAVVGTALIKKYPKLESEFVYGDYKVYDVRKMIAKSEQEIGKATAKYFFYSNIMNFFKTEITLANGEIRKRPLIETNGETGEIVWDKGRDFATVRKVLSMPQVNIVKKTEVQTGGFSKESILPKRNSDKLIARKKDWDPKKYGGFDSPTVAYSVLVVAKVEKGKSKKLKSVKELLGITIMERSSFEKNPIDFLEAKGYKEVKKDLIIKLPKYSLFELENGRKRMLASAGELQKGNELALPSKYVNFLYLASHYEKLKGTAHAEIMALRQGGLVMQNYRLIDATLYVTFEPCVMCAGAMIHSRIGRVVFGVRNAKTGAAGSLMDVLHYPGMNHRVEITEGILADECAALLCYFFRMPRQVFNAQKKAQSSTDGSSGSETPGTSESATPESSGSEVEFSHEYWMRHALTLAKRARDEREVPVGAVLVLNNRVIGEGWNRAIGLHDPSPEDNEQKQLFVEQHKHYLDEIIEQISEFSKRVILADANLDKVLSAYNKHRDKPIREQAENIIHLFTLTNLGAPAAFKYFDTTIDRKRYTSTKEVLDATLIHQSITGLYETRIDLSQLGGD

SEQ ID NO: 309 - protein, 160 aa, Staphylococcus aureus
  REGION 1..160: note = MISC_FEATURE - TadA polypeptide sequence
MGSHMTNDIYFMTLAIEEAKKAAQLGEVPIGAIITKDDEVIARAHNLRETLQQPTAHAEHIAIERAAKVLGSWRLEGCTLYVTLEPCVMCAGTIVMSRIPRVVYGADDPKGGCSGSLMNLLQQSNFNHRAIVDKGVLKEACSTLLTTFFKNLRANKKSTN

SEQ ID NO: 310 - protein, 161 aa, Bacillus subtilis
  REGION 1..161: note = MISC_FEATURE - TadA polypeptide sequence
MTQDELYMKEAIKEAKKAEEKGEVPIGAVLVINGEIIARAHNLRETEQRSIAHAEMLVIDEACKALGTWRLEGATLYVTLEPCPMCAGAVVLSRVEKVVFGAFDPKGGCSGTLMNLLQEERFNHQAEVVSGVLEEECGGMLSAFFRELRKKKKAARKNLSE

SEQ ID NO: 311 - protein, 183 aa, Salmonella enterica
  REGION 1..183: note = MISC_FEATURE - TadA polypeptide sequence
  source 1..183: note = serovar Typhimurium
MPPAFITGVTSLSDVELDHEYWMRHALTLAKRAWDEREVPVGAVLVHNHRVIGEGWNRPIGRHDPTAHAEIMALRQGGLVLQNYRLLDTTLYVTLEPCVMCAGAMVHSRIGRVVFGARDAKTGAAGSLIDVLHHPGMNHRVEIIEGVLRDECATLLSDFFRMRRQEIKALKKADRAEGAGPAV

SEQ ID NO: 312 - protein, 164 aa, Shewanella putrefaciens
  REGION 1..164: note = MISC_FEATURE - TadA polypeptide sequence
MDEYWMQVAMQMAEKAEAAGEVPVGAVLVKDGQQIATGYNLSISQHDPTAHAEILCLRSAGKKLENYRLLDATLYITLEPCAMCAGAMVHSRIARVVYGARDEKTGAAGTVVNLLQHPAFNHQVEVTSGVLAEACSAQLSRFFKRRRDEKKALKLAQRAQQGIE

SEQ ID NO: 313 - protein, 173 aa, Haemophilus influenzae
  REGION 1..173: note = MISC_FEATURE - TadA polypeptide sequence
MDAAKVRSEFDEKMMRYALELADKAEALGEIPVGAVLVDDARNIIGEGWNLSIVQSDPTAHAEIIALRNGAKNIQNYRLLNSTLYVTLEPCTMCAGAILHSRIKRLVFGASDYKTGAIGSRFHFFDDYKMNHTLEITSGVLAEECSQKLSTFFQKRREEKKIEKALLKSLSDK

SEQ ID NO: 314 - protein, 161 aa, Caulobacter crescentus
  REGION 1..161: note = MISC_FEATURE - TadA polypeptide sequence
MRTDESEDQDHRMMRLALDAARAAAEAGETPVGAVILDPSTGEVIATAGNGPIAAHDPTAHAEIAAMRAAAAKLGNYRLTDLTLVVTLEPCAMCAGAISHARIGRVVFGADDPKGGAVVHGPKFFAQPTCHWRPEVTGGVLADESADLLRGFFRARRKAKI

SEQ ID NO: 315 - protein, 179 aa, Geobacter sulfurreducens
  REGION 1..179: note = MISC_FEATURE - TadA polypeptide sequence
MSSLKKTPIRDDAYWMGKAIREAAKAAARDEVPIGAVIVRDGAVIGRGHNLREGSNDPSAHAEMIAIRQAARRSANWRLTGATLYVTLEPCLMCMGAIILARLERVVFGCYDPKGGAAGSLYDLSADPRLNHQVRLSPGVCQEECGTMLSDFFRDLRRRKKAKATPALFIDERKVPPEP

SEQ ID NO: 316 - protein, 167 aa, synthetic construct
  REGION 1..167: note = TadA*8 polypeptide sequence
MSEVEFSHEYWMRHALTLAKRARDEREVPVGAVLVLNNRVIGEGWNRAIGLHDPTAHAEIMALRQGGLVMQNYRLIDATLYVTFEPCVMCAGAMIHSRIGRVVFGVRNAKTGAAGSLMDVLHYPGMNHRVEITEGILADECAALLCTFFRMPRQVFNAQKKAQSSTD

SEQ ID NO: 317 - RNA, 80 nt, synthetic construct
  misc_feature 1..80: note = gRNA scaffold polynucleotide sequence
  source 1..80: mol_type = other RNA
gttttagagctagaaatagcaagttaaaataaggctagtccgttatcaacttgaaaaagtggcaccgagtcggtgctttt

SEQ ID NO: 318 - RNA, 125 nt, synthetic construct
  misc_feature 1..125: note = gRNA scaffold polynucleotide sequence
  source 1..125: mol_type = other RNA
gtttttgtactctcaagatttaagtaactgtacaacgaaacttacacagttacttaaatcttgcagaagctacaaagataaggcttcatgccgaaatcaacaccctgtcattttatggcagggtg

SEQ ID NO: 319 - RNA, 76 nt, Streptococcus pyogenes
  misc_feature 1..76: note = S. pyogenes gRNA scaffold oligonucleotide sequence
  source 1..76: mol_type = other RNA
gttttagagctagaaatagcaagttaaaataaggctagtccgttatcaacttgaaaaagtggcaccgagtcggtgc

SEQ ID NO: 320 - RNA, 84 nt, Staphylococcus aureus
  misc_feature 1..84: note = S. aureus gRNA scaffold oligonucleotide sequence
  source 1..84: mol_type = other RNA
gttttagtactctgtaatgaaaattacagaatctactaaaacaaggcaaaatgccgtgtttatctcgtcaacttgttggcgaga

SEQ ID NO: 321 - RNA, 97 nt, Bacillus hisashii
  misc_feature 1..97: note = BhCas12b gRNA scaffold oligonucleotide sequence
  source 1..97: mol_type = other RNA
gttctgtcttttggtcaggacaaccgtctagctataagtgctgcagggtgtgagaaactcctattgctggacgatgtctcttacgaggcattagcac

SEQ ID NO: 322 - RNA, 88 nt, Bacillus sp.
  misc_feature 1..88: note = BvCas12b gRNA scaffold oligonucleotide sequence
  source 1..88: mol_type = other RNA
gacctatagggtcaatgaatctgtgcgtgtgccataagtaattaaaaattacccaccacaggagcacctgaaaacaggtgcttggcac

SEQ ID NO: 323 - RNA, 80 nt, synthetic construct
  misc_feature 1..80: note = gRNA scaffold nucleotide sequence; oligonucleotide sequence
  modified_base 78..80: mod_base = um
  source 1..80: mol_type = other RNA
  modified_base 78..80: mod_base = OTHER; note = In embodiments, a nucleotide(s) is linked to the preceding 5' nucleotide by a 3' phosphorothioate internucleotide linkage
gttttagagctagaaatagcaagttaaaataaggctagtccgttatcaacttgaaaaagtgggaccgagtcggtgctttt

SEQ ID NO: 324 - RNA, 80 nt, synthetic construct; identical to SEQ ID NO: 317
  misc_feature 1..80: note = gRNA scaffold nucleotide sequence
  modified_base 78..80: mod_base = OTHER; note = In embodiments, a nucleotide(s) is linked to the preceding 5' nucleotide by a 3' phosphorothioate internucleotide linkage
  modified_base 78..80: mod_base = um
  source 1..80: mol_type = other RNA

SEQ ID NO: 325 - RNA, 117 nt, Bacillus hisashii
  misc_feature 1..117: note = BhCas12b gRNA scaffold + guide sequence; oligonucleotide sequence
  misc_feature 1..97: note = BhCas12b sgRNA scaffold
  source 1..117: mol_type = other RNA
gttctgtcttttggtcaggacaaccgtctagctataagtgctgcagggtgtgagaaactcctattgctggacgatgtctcttacgaggcattagcacnnnnnnnnnnnnnnnnnnnn

SEQ ID NO: 326 - RNA, 108 nt, Bacillus sp.
  misc_feature 1..108: note = BvCas12b gRNA scaffold + guide sequence; oligonucleotide sequence
  misc_feature 1..88: note = BvCas12b gRNA scaffold
  source 1..108: mol_type = other RNA
gacctatagggtcaatgaatctgtgcgtgtgccataagtaattaaaaattacccaccacaggagcacctgaaaacaggtgcttggcacnnnnnnnnnnnnnnnnnnnn

SEQ ID NO: 327 - RNA, 119 nt, Alicyclobacillus acidiphilus
  misc_feature 1..119: note = AaCas12b gRNA scaffold + guide sequence; oligonucleotide sequence
  misc_feature 1..99: note = AaCas12b gRNA scaffold
  source 1..119: mol_type = other RNA
gtctaaaggacagaatttttcaacgggtgtgccaatggccactttccaggtggcaaagcccgttgaacttctcaaaaagaacgatctgagaagtggcacnnnnnnnnnnnnnnnnnnnn

SEQ ID NO: 328 - protein, 29 aa, synthetic construct
  REGION 1..29: note = synthetic polypeptide sequence
PKKKRKVEGADKRTADGSEFESPKKKRKV

SEQ ID NO: 329 - protein, 23 aa, synthetic construct
  REGION 1..23: note = synthetic peptide sequence
RKSGKIAAIVVKRPRKPKKKRKV

SEQ ID NO: 330 - protein, 8 aa, synthetic construct
  REGION 1..8: note = synthetic peptide sequence
SGGSSGGS

SEQ ID NO: 331 - protein, 1609 aa, synthetic construct
  REGION 1..1609: note = pNMG-B335ABE8.1_Y147T_CP5_NGC PAM_monomer polypeptide sequence
MSEVEFSHEYWMRHALTLAKRARDEREVPVGAVLVLNNRVIGEGWNRAIGLHDPTAHAEIMALRQGGLVMQNYRLIDATLYVTFEPCVMCAGAMIHSRIGRVVFGVRNAKTGAAGSLMDVLHYPGMNHRVEITEGILADECAALLCTFFRMPRQVFNAQKKAQSSTDSGGSSGGSSGSETPGTSESATPESSGGSSGGSEIGKATAKYFFYSNIMNFFKTEITLANGEIRKRPLIETNGETGEIVWDKGRDFATVRKVLSMPQVNIVKKTEVQTGGFSKESILPKRNSDKLIARKKDWDPKKYGGFMQPTVAYSVLVVAKVEKGKSKKLKSVKELLGITIMERSSFEKNPIDFLEAKGYKEVKKDLIIKLPKYSLFELENGRKRMLASAKFLQKGNELALPSKYVNFLYLASHYEKLKGSPEDNEQKQLFVEQHKHYLDEIIEQISEFSKRVILADANLDKVLSAYNKHRDKPIREQAENIIHLFTLTNLGAPRAFKYFDTTIARKEYRSTKEVLDATLIHQSITGLYETRIDLSQLGGDGGSGGSGGSGGSGGSGGSGGMDKKYSIGLAIGTNSVGWAVITDEYKVPSKKFKVLGNTDRHSIKKNLIGALLFDSGETAEATRLKRTARRRYTRRKNRICYLQEIFSNEMAKVDDSFFHRLEESFLVEEDKKHERHPIFGNIVDEVAYHEKYPTIYHLRKKLVDSTDKADLRLIYLALAHMIKFRGHFLIEGDLNPDNSDVDKLFIQLVQTYNQLFEENPINASGVDAKAILSARLSKSRRLENLIAQLPGEKKNGLFGNLIALSLGLTPNFKSNFDLAEDAKLQLSKDTYDDDLDNLLAQIGDQYADLFLAAKNLSDAILLSDILRVNTEITKAPLSASMIKRYDEHHQDLTLLKALVRQQLPEKYKEIFFDQSKNGYAGYIDGGASQEEFYKFIKPILEKMDGTEELLVKLNREDLLRKQRTFDNGSIPHQIHLGELHAILRRQEDFYPFLKDNREKIEKILTFRIPYYVGPLARGNSRFAWMTRKSEETITPWNFEEVVDKGASAQSFIERMTNFDKNLPNEKVLPKHSLLYEYFTVYNELTKVKYVTEGMRKPAFLSGEQKKAIVDLLFKTNRKVTVKQLKEDYFKKIECFDSVEISGVEDRFNASLGTYHDLLKIIKDKDFLDNEENEDILEDIVLTLTLFEDREMIEERLKTYAHLFDDKVMKQLKRRRYTGWGRLSRKLINGIRDKQSGKTILDFLKSDGFANRNFMQLIHDDSLTFKEDIQKAQVSGQGDSLHEHIANLAGSPAIKKGILQTVKVVDELVKVMGRHKPENIVIEMARENQTTQKGQKNSRERMKRIEEGIKELGSQILKEHPVENTQLQNEKLYLYYLQNGRDMYVDQELDINRLSDYDVDHIVPQSFLKDDSIDNKVLTRSDKNRGKSDNVPSEEVVKKMKNYWRQLLNAKLITQRKFDNLTKAERGGLSELDKAGFIKRQLVETRQITKHVAQILDSRMNTKYDENDKLIREVKVITLKSKLVSDFRKDFQFYKVREINNYHHAHDAYLNAVVGTALIKKYPKLESEFVYGDYKVYDVRKMIAKSEQEGADKRTADGSEFESPKKKRKV

SEQ ID NO: 332 - protein, 1807 aa, synthetic construct
  REGION 1..1807: note = pNMG-357_ABE8.14 with NGC PAMCP5 polypeptide sequence
  REGION 1..174: note = MISC_FEATURE - Adenosine deaminase sequence
  REGION 175..198: note = MISC_FEATURE - Linker sequence
  REGION 199..365: note = MISC_FEATURE - Adenosine deaminase sequence
  REGION 366..397: note = MISC_FEATURE - Linker sequence
  REGION 398..738: note = MISC_FEATURE - Sequence derived from Cas9
  REGION 739..759: note = MISC_FEATURE - Linker sequence
  REGION 760..1785: note = MISC_FEATURE - Sequence derived from Cas9
  REGION 1786..1807: note = MISC_FEATURE - Bipartite nuclear localization sequence
MSEVEFSHEYWMRHALTLAKRAWDEREVPVGAVLVHNNRVIGEGWNRPIGRHDPTAHAEIMALRQGGLVMQNYRLIDATLYVTLEPCVMCAGAMIHSRIGRVVFGARDAKTGAAGSLMDVLHHPGMNHRVEITEGILADECAALLSDFFRMRRQEIKAQKKAQSSTDGGSSGGSSGSETPGTSESATPESSGGSSGGSMSEVEFSHEYWMRHALTLAKRARDEREVPVGAVLVLNNRVIGEGWNRAIGLHDPTAHAEIMALRQGGLVMQNYRLIDATLYVTFEPCVMCAGAMIHSRIGRVVFGVRNAKTGAAGSLMDVLHYPGMNHRVEITEGILADECAALLCTFFRMPRQVFNAQKKAQSSTDSGGSSGGSSGSETPGTSESATPESSGGSSGGSEIGKATAKYFFYSNIMNFFKTEITLANGEIRKRPLIETNGETGEIVWDKGRDFATVRKVLSMPQVNIVKKTEVQTGGFSKESILPKRNSDKLIARKKDWDPKKYGGFMQPTVAYSVLVVAKVEKGKSKKLKSVKELLGITIMERSSFEKNPIDFLEAKGYKEVKKDLIIKLPKYSLFELENGRKRMLASAKFLQKGNELALPSKYVNFLYLASHYEKLKGSPEDNEQKQLFVEQHKHYLDEIIEQISEFSKRVILADANLDKVLSAYNKHRDKPIREQAENIIHLFTLTNLGAPRAFKYFDTTIARKEYRSTKEVLDATLIHQSITGLYETRIDLSQLGGDGGSGGSGGSGGSGGSGGSGGMDKKYSIGLAIGTNSVGWAVITDEYKVPSKKFKVLGNTDRHSIKKNLIGALLFDSGETAEATRLKRTARRRYTRRKNRICYLQEIFSNEMAKVDDSFFHRLEESFLVEEDKKHERHPIFGNIVDEVAYHEKYPTIYHLRKKLVDSTDKADLRLIYLALAHMIKFRGHFLIEGDLNPDNSDVDKLFIQLVQTYNQLFEENPINASGVDAKAILSARLSKSRRLENLIAQLPGEKKNGLFGNLIALSLGLTPNFKSNFDLAEDAKLQLSKDTYDDDLDNLLAQIGDQYADLFLAAKNLSDAILLSDILRVNTEITKAPLSASMIKRYDEHHQDLTLLKALVRQQLPEKYKEIFFDQSKNGYAGYIDGGASQEEFYKFIKPILEKMDGTEELLVKLNREDLLRKQRTFDNGSIPHQIHLGELHAILRRQEDFYPFLKDNREKIEKILTFRIPYYVGPLARGNSRFAWMTRKSEETITPWNFEEVVDKGASAQSFIERMTNFDKNLPNEKVLPKHSLLYEYFTVYNELTKVKYVTEGMRKPAFLSGEQKKAIVDLLFKTNRKVTVKQLKEDYFKKIECFDSVEISGVEDRFNASLGTYHDLLKIIKDKDFLDNEENEDILEDIVLTLTLFEDREMIEERLKTYAHLFDDKVMKQLKRRRYTGWGRLSRKLINGIRDKQSGKTILDFLKSDGFANRNFMQLIHDDSLTFKEDIQKAQVSGQGDSLHEHIANLAGSPAIKKGILQTVKVVDELVKVMGRHKPENIVIEMARENQTTQKGQKNSRERMKRIEEGIKELGSQILKEHPVENTQLQNEKLYLYYLQNGRDMYVDQELDINRLSDYDVDHIVPQSFLKDDSIDNKVLTRSDKNRGKSDNVPSEEVVKKMKNYWRQLLNAKLITQRKFDNLTKAERGGLSELDKAGFIKRQLVETRQITKHVAQILDSRMNTKYDENDKLIREVKVITLKSKLVSDFRKDFQFYKVREINNYHHAHDAYLNAVVGTALIKKYPKLESEFVYGDYKVYDVRKMIAKSEQEGADKRTADGSEFESPKKKRKV

SEQ ID NO: 333 - protein, 1588 aa, synthetic construct
  REGION 1..1588: note = ABE8.8-m polypeptide sequence
  REGION 1..167: note = MISC_FEATURE - Adenosine deaminase sequence
  REGION 168..199: note = MISC_FEATURE - Linker sequence
  REGION 200..1566: note = MISC_FEATURE - Sequence derived from Cas9
  REGION 1567..1588: note = MISC_FEATURE - Bipartite nuclear localization sequence
MSEVEFSHEYWMRHALTLAKRARDEREVPVGAVLVLNNRVIGEGWNRAIGLHDPTAHAEIMALRQGGLVMQNYRLIDATLYVTFEPCVMCAGAMIHSRIGRVVFGVRNAKTGAAGSLMDVLHHPGMNHRVEITEGILADECAALLCRFFRMPRRVFNAQKKAQSSTDSGGSSGGSSGSETPGTSESATPESSGGSSGGSDKKYSIGLAIGTNSVGWAVITDEYKVPSKKFKVLGNTDRHSIKKNLIGALLFDSGETAEATRLKRTARRRYTRRKNRICYLQEIFSNEMAKVDDSFFHRLEESFLVEEDKKHERHPIFGNIVDEVAYHEKYPTIYHLRKKLVDSTDKADLRLIYLALAHMIKFRGHFLIEGDLNPDNSDVDKLFIQLVQTYNQLFEENPINASGVDAKAILSARLSKSRRLENLIAQLPGEKKNGLFGNLIALSLGLTPNFKSNFDLAEDAKLQLSKDTYDDDLDNLLAQIGDQYADLFLAAKNLSDAILLSDILRVNTEITKAPLSASMIKRYDEHHQDLTLLKALVRQQLPEKYKEIFFDQSKNGYAGYIDGGASQEEFYKFIKPILEKMDGTEELLVKLNREDLLRKQRTFDNGSIPHQIHLGELHAILRRQEDFYPFLKDNREKIEKILTFRIPYYVGPLARGNSRFAWMTRKSEETITPWNFEEVVDKGASAQSFIERMTNFDKNLPNEKVLPKHSLLYEYFTVYNELTKVKYVTEGMRKPAFLSGEQKKAIVDLLFKTNRKVTVKQLKEDYFKKIECFDSVEISGVEDRFNASLGTYHDLLKIIKDKDFLDNEENEDILEDIVLTLTLFEDREMIEERLKTYAHLFDDKVMKQLKRRRYTGWGRLSRKLINGIRDKQSGKTILDFLKSDGFANRNFMQLIHDDSLTFKEDIQKAQVSGQGDSLHEHIANLAGSPAIKKGILQTVKVVDELVKVMGRHKPENIVIEMARENQTTQKGQKNSRERMKRIEEGIKELGSQILKEHPVENTQLQNEKLYLYYLQNGRDMYVDQELDINRLSDYDVDHIVPQSFLKDDSIDNKVLTRSDKNRGKSDNVPSEEVVKKMKNYWRQLLNAKLITQRKFDNLTKAERGGLSELDKAGFIKRQLVETRQITKHVAQILDSRMNTKYDENDKLIREVKVITLKSKLVSDFRKDFQFYKVREINNYHHAHDAYLNAVVGTALIKKYPKLESEFVYGDYKVYDVRKMIAKSEQEIGKATAKYFFYSNIMNFFKTEITLANGEIRKRPLIETNGETGEIVWDKGRDFATVRKVLSMPQVNIVKKTEVQTGGFSKESILPKRNSDKLIARKKDWDPKKYGGFDSPTVAYSVLVVAKVEKGKSKKLKSVKELLGITIMERSSFEKNPIDFLEAKGYKEVKKDLIIKLPKYSLFELENGRKRMLASAGELQKGNELALPSKYVNFLYLASHYEKLKGSPEDNEQKQLFVEQHKHYLDEIIEQISEFSKRVILADANLDKVLSAYNKHRDKPIREQAENIIHLFTLTNLGAPAAFKYFDTTIDRKRYTSTKEVLDATLIHQSITGLYETRIDLSQLGGDEGADKRTADGSEFESPKKKRKV

SEQ ID NO: 334 - protein, 1786 aa, synthetic construct
  REGION 1..1786: note = ABE8.8-d polypeptide sequence
  REGION 1..167: note = MISC_FEATURE - Adenosine deaminase sequence
  REGION 168..199: note = MISC_FEATURE - Linker sequence
  REGION 200..365: note = MISC_FEATURE - Adenosine deaminase sequence
  REGION 366..397: note = MISC_FEATURE - Linker sequence
  REGION 398..1764: note = MISC_FEATURE - Sequence derived from Cas9
  REGION 1765..1786: note = MISC_FEATURE - Bipartite nuclear localization sequence
MSEVEFSHEYWMRHALTLAKRAWDEREVPVGAVLVHNNRVIGEGWNRPIGRHDPTAHAEIMALRQGGLVMQNYRLIDATLYVTLEPCVMCAGAMIHSRIGRVVFGARDAKTGAAGSLMDVLHHPGMNHRVEITEGILADECAALLSDFFRMRRQEIKAQKKAQSSTDSGGSSGGSSGSETPGTSESATPESSGGSSGGSSEVEFSHEYWMRHALTLAKRARDEREVPVGAVLVLNNRVIGEGWNRAIGLHDPTAHAEIMALRQGGLVMQNYRLIDATLYVTFEPCVMCAGAMIHSRIGRVVFGVRNAKTGAAGSLMDVLHHPGMNHRVEITEGILADECAALLCRFFRMPRRVFNAQKKAQSSTDSGGSSGGSSGSETPGTSESATPESSGGSSGGSDKKYSIGLAIGTNSVGWAVITDEYKVPSKKFKVLGNTDRHSIKKNLIGALLFDSGETAEATRLKRTARRRYTRRKNRICYLQEIFSNEMAKVDDSFFHRLEESFLVEEDKKHERHPIFGNIVDEVAYHEKYPTIYHLRKKLVDSTDKADLRLIYLALAHMIKFRGHFLIEGDLNPDNSDVDKLFIQLVQTYNQLFEENPINASGVDAKAILSARLSKSRRLENLIAQLPGEKKNGLFGNLIALSLGLTPNFKSNFDLAEDAKLQLSKDTYDDDLDNLLAQIGDQYADLFLAAKNLSDAILLSDILRVNTEITKAPLSASMIKRYDEHHQDLTLLKALVRQQLPEKYKEIFFDQSKNGYAGYIDGGASQEEFYKFIKPILEKMDGTEELLVKLNREDLLRKQRTFDNGSIPHQIHLGELHAILRRQEDFYPFLKDNREKIEKILTFRIPYYVGPLARGNSRFAWMTRKSEETITPWNFEEVVDKGASAQSFIERMTNFDKNLPNEKVLPKHSLLYEYFTVYNELTKVKYVTEGMRKPAFLSGEQKKAIVDLLFKTNRKVTVKQLKEDYFKKIECFDSVEISGVEDRFNASLGTYHDLLKIIKDKDFLDNEENEDILEDIVLTLTLFEDREMIEERLKTYAHLFDDKVMKQLKRRRYTGWGRLSRKLINGIRDKQSGKTILDFLKSDGFANRNFMQLIHDDSLTFKEDIQKAQVSGQGDSLHEHIANLAGSPAIKKGILQTVKVVDELVKVMGRHKPENIVIEMARENQTTQKGQKNSRERMKRIEEGIKELGSQILKEHPVENTQLQNEKLYLYYLQNGRDMYVDQELDINRLSDYDVDHIVPQSFLKDDSIDNKVLTRSDKNRGKSDNVPSEEVVKKMKNYWRQLLNAKLITQRKFDNLTKAERGGLSELDKAGFIKRQLVETRQITKHVAQILDSRMNTKYDENDKLIREVKVITLKSKLVSDFRKDFQFYKVREINNYHHAHDAYLNAVVGTALIKKYPKLESEFVYGDYKVYDVRKMIAKSEQEIGKATAKYFFYSNIMNFFKTEITLANGEIRKRPLIETNGETGEIVWDKGRDFATVRKVLSMPQVNIVKKTEVQTGGFSKESILPKRNSDKLIARKKDWDPKKYGGFDSPTVAYSVLVVAKVEKGKSKKLKSVKELLGITIMERSSFEKNPIDFLEAKGYKEVKKDLIIKLPKYSLFELENGRKRMLASAGELQKGNELALPSKYVNFLYLASHYEKLKGSPEDNEQKQLFVEQHKHYLDEIIEQISEFSKRVILADANLDKVLSAYNKHRDKPIREQAENIIHLFTLTNLGAPAAFKYFDTTIDRKRYTSTKEVLDATLIHQSITGLYETRIDLSQLGGDEGADKRTADGSEFESPKKKRKV

SEQ ID NO: 335 - protein, 1588 aa, synthetic construct
  REGION 1..1588: note = ABE8.13-m polypeptide sequence
  REGION 1..167: note = MISC_FEATURE - Adenosine deaminase sequence
  REGION 168..199: note = MISC_FEATURE - Linker sequence
  REGION 200..1566: note = MISC_FEATURE - Sequence derived from Cas9
  REGION 1567..1588: note = MISC_FEATURE - Bipartite nuclear localization sequence
MSEVEFSHEYWMRHALTLAKRARDEREVPVGAVLVLNNRVIGEGWNRAIGLHDPTAHAEIMALRQGGLVMQNYRLYDATLYVTFEPCVMCAGAMIHSRIGRVVFGVRNAKTGAAGSLMDVLHHPGMNHRVEITEGILADECAALLCRFFRMPRRVFNAQKKAQSSTDSGGSSGGSSGSETPGTSESATPESSGGSSGGSDKKYSIGLAIGTNSVGWAVITDEYKVPSKKFKVLGNTDRHSIKKNLIGALLFDSGETAEATRLKRTARRRYTRRKNRICYLQEIFSNEMAKVDDSFFHRLEESFLVEEDKKHERHPIFGNIVDEVAYHEKYPTIYHLRKKLVDSTDKADLRLIYLALAHMIKFRGHFLIEGDLNPDNSDVDKLFIQLVQTYNQLFEENPINASGVDAKAILSARLSKSRRLENLIAQLPGEKKNGLFGNLIALSLGLTPNFKSNFDLAEDAKLQLSKDTYDDDLDNLLAQIGDQYADLFLAAKNLSDAILLSDILRVNTEITKAPLSASMIKRYDEHHQDLTLLKALVRQQLPEKYKEIFFDQSKNGYAGYIDGGASQEEFYKFIKPILEKMDGTEELLVKLNREDLLRKQRTFDNGSIPHQIHLGELHAILRRQEDFYPFLKDNREKIEKILTFRIPYYVGPLARGNSRFAWMTRKSEETITPWNFEEVVDKGASAQSFIERMTNFDKNLPNEKVLPKHSLLYEYFTVYNELTKVKYVTEGMRKPAFLSGEQKKAIVDLLFKTNRKVTVKQLKEDYFKKIECFDSVEISGVEDRFNASLGTYHDLLKIIKDKDFLDNEENEDILEDIVLTLTLFEDREMIEERLKTYAHLFDDKVMKQLKRRRYTGWGRLSRKLINGIRDKQSGKTILDFLKSDGFANRNFMQLIHDDSLTFKEDIQKAQVSGQGDSLHEHIANLAGSPAIKKGILQTVKVVDELVKVMGRHKPENIVIEMARENQTTQKGQKNSRERMKRIEEGIKELGSQILKEHPVENTQLQNEKLYLYYLQNGRDMYVDQELDINRLSDYDVDHIVPQSFLKDDSIDNKVLTRSDKNRGKSDNVPSEEVVKKMKNYWRQLLNAKLITQRKFDNLTKAERGGLSELDKAGFIKRQLVETRQITKHVAQILDSRMNTKYDENDKLIREVKVITLKSKLVSDFRKDFQFYKVREINNYHHAHDAYLNAVVGTALIKKYPKLESEFVYGDYKVYDVRKMIAKSEQEIGKATAKYFFYSNIMNFFKTEITLANGEIRKRPLIETNGETGEIVWDKGRDFATVRKVLSMPQVNIVKKTEVQTGGFSKESILPKRNSDKLIARKKDWDPKKYGGFDSPTVAYSVLVVAKVEKGKSKKLKSVKELLGITIMERSSFEKNPIDFLEAKGYKEVKKDLIIKLPKYSLFELENGRKRMLASAGELQKGNELALPSKYVNFLYLASHYEKLKGSPEDNEQKQLFVEQHKHYLDEIIEQISEFSKRVILADANLDKVLSAYNKHRDKPIREQAENIIHLFTLTNLGAPAAFKYFDTTIDRKRYTSTKEVLDATLIHQSITGLYETRIDLSQLGGDEGADKRTADGSEFESPKKKRKV

SEQ ID NO: 336 - protein, 1786 aa, synthetic construct
  REGION 1..1786: note = ABE8.13-d polypeptide sequence
  REGION 1..167: note = MISC_FEATURE - Adenosine deaminase sequence
  REGION 168..199: note = MISC_FEATURE - Linker sequence
  REGION 200..365: note = MISC_FEATURE - Adenosine deaminase sequence
  REGION 366..397: note = MISC_FEATURE - Linker sequence
  REGION 398..1764: note = MISC_FEATURE - Sequence derived from Cas9
  REGION 1765..1786: note = MISC_FEATURE - Bipartite nuclear localization sequence
MSEVEFSHEYWMRHALTLAKRAWDEREVPVGAVLVHNNRVIGEGWNRPIGRHDPTAHAEIMALRQGGLVMQNYRLIDATLYVTLEPCVMCAGAMIHSRIGRVVFGARDAKTGAAGSLMDVLHHPGMNHRVEITEGILADECAALLSDFFRMRRQEIKAQKKAQSSTDSGGSSGGSSGSETPGTSESATPESSGGSSGGSSEVEFSHEYWMRHALTLAKRARDEREVPVGAVLVLNNRVIGEGWNRAIGLHDPTAHAEIMALRQGGLVMQNYRLYDATLYVTFEPCVMCAGAMIHSRIGRVVFGVRNAKTGAAGSLMDVLHHPGMNHRVEITEGILADECAALLCRFFRMPRRVFNAQKKAQSSTDSGGSSGGSSGSETPGTSESATPESSGGSSGGSDKKYSIGLAIGTNSVGWAVITDEYKVPSKKFKVLGNTDRHSIKKNLIGALLFDSGETAEATRLKRTARRRYTRRKNRICYLQEIFSNEMAKVDDSFFHRLEESFLVEEDKKHERHPIFGNIVDEVAYHEKYPTIYHLRKKLVDSTDKADLRLIYLALAHMIKFRGHFLIEGDLNPDNSDVDKLFIQLVQTYNQLFEENPINASGVDAKAILSARLSKSRRLENLIAQLPGEKKNGLFGNLIALSLGLTPNFKSNFDLAEDAKLQLSKDTYDDDLDNLLAQIGDQYADLFLAAKNLSDAILLSDILRVNTEITKAPLSASMIKRYDEHHQDLTLLKALVRQQLPEKYKEIFFDQSKNGYAGYIDGGASQEEFYKFIKPILEKMDGTEELLVKLNREDLLRKQRTFDNGSIPHQIHLGELHAILRRQEDFYPFLKDNREKIEKILTFRIPYYVGPLARGNSRFAWMTRKSEETITPWNFEEVVDKGASAQSFIERMTNFDKNLPNEKVLPKHSLLYEYFTVYNELTKVKYVTEGMRKPAFLSGEQKKAIVDLLFKTNRKVTVKQLKEDYFKKIECFDSVEISGVEDRFNASLGTYHDLLKIIKDKDFLDNEENEDILEDIVLTLTLFEDREMIEERLKTYAHLFDDKVMKQLKRRRYTGWGRLSRKLINGIRDKQSGKTILDFLKSDGFANRNFMQLIHDDSLTFKEDIQKAQVSGQGDSLHEHIANLAGSPAIKKGILQTVKVVDELVKVMGRHKPENIVIEMARENQTTQKGQKNSRERMKRIEEGIKELGSQILKEHPVENTQLQNEKLYLYYLQNGRDMYVDQELDINRLSDYDVDHIVPQSFLKDDSIDNKVLTRSDKNRGKSDNVPSEEVVKKMKNYWRQLLNAKLITQRKFDNLTKAERGGLSELDKAGFIKRQLVETRQITKHVAQILDSRMNTKYDENDKLIREVKVITLKSKLVSDFRKDFQFYKVREINNYHHAHDAYLNAVVGTALIKKYPKLESEFVYGDYKVYDVRKMIAKSEQEIGKATAKYFFYSNIMNFFKTEITLANGEIRKRPLIETNGETGEIVWDKGRDFATVRKVLSMPQVNIVKKTEVQTGGFSKESILPKRNSDKLIARKKDWDPKKYGGFDSPTVAYSVLVVAKVEKGKSKKLKSVKELLGITIMERSSFEKNPIDFLEAKGYKEVKKDLIIKLPKYSLFELENGRKRMLASAGELQKGNELALPSKYVNFLYLASHYEKLKGSPEDNEQKQLFVEQHKHYLDEIIEQISEFSKRVILADANLDKVLSAYNKHRDKPIREQAENIIHLFTLTNLGAPAAFKYFDTTIDRKRYTSTKEVLDATLIHQSITGLYETRIDLSQLGGDEGADKRTADGSEFESPKKKRKV

SEQ ID NO: 337 - protein, 1588 aa, synthetic construct
  REGION 1..1588: note = ABE8.17-m polypeptide sequence
  REGION 1..167: note = MISC_FEATURE - Adenosine deaminase sequence
  REGION 168..199: note = MISC_FEATURE - Linker sequence
  REGION 200..1566: note = MISC_FEATURE - Sequence derived from Cas9
  REGION 1567..1588: note = MISC_FEATURE - Bipartite nuclear localization sequence
MSEVEFSHEYWMRHALTLAKRARDEREVPVGAVLVLNNRVIGEGWNRAIGLHDPTAHAEIMALRQGGLVMQNYRLIDATLYSTFEPCVMCAGAMIHSRIGRVVFGVRNAKTGAAGSLMDVLHYPGMNHRVEITEGILADECAALLCYFFRMPRRVFNAQKKAQSSTDSGGSSGGSSGSETPGTSESATPESSGGSSGGSDKKYSIGLAIGTNSVGWAVITDEYKVPSKKFKVLGNTDRHSIKKNLIGALLFDSGETAEATRLKRTARRRYTRRKNRICYLQEIFSNEMAKVDDSFFHRLEESFLVEEDKKHERHPIFGNIVDEVAYHEKYPTIYHLRKKLVDSTDKADLRLIYLALAHMIKFRGHFLIEGDLNPDNSDVDKLFIQLVQTYNQLFEENPINASGVDAKAILSARLSKSRRLENLIAQLPGEKKNGLFGNLIALSLGLTPNFKSNFDLAEDAKLQLSKDTYDDDLDNLLAQIGDQYADLFLAAKNLSDAILLSDILRVNTEITKAPLSASMIKRYDEHHQDLTLLKALVRQQLPEKYKEIFFDQSKNGYAGYIDGGASQEEFYKFIKPILEKMDGTEELLVKLNREDLLRKQRTFDNGSIPHQIHLGELHAILRRQEDFYPFLKDNREKIEKILTFRIPYYVGPLARGNSRFAWMTRKSEETITPWNFEEVVDKGASAQSFIERMTNFDKNLPNEKVLPKHSLLYEYFTVYNELTKVKYVTEGMRKPAFLSGEQKKAIVDLLFKTNRKVTVKQLKEDYFKKIECFDSVEISGVEDRFNASLGTYHDLLKIIKDKDFLDNEENEDILEDIVLTLTLFEDREMIEERLKTYAHLFDDKVMKQLKRRRYTGWGRLSRKLINGIRDKQSGKTILDFLKSDGFANRNFMQLIHDDSLTFKEDIQKAQVSGQGDSLHEHIANLAGSPAIKKGILQTVKVVDELVKVMGRHKPENIVIEMARENQTTQKGQKNSRERMKRIEEGIKELGSQILKEHPVENTQLQNEKLYLYYLQNGRDMYVDQELDINRLSDYDVDHIVPQSFLKDDSIDNKVLTRSDKNRGKSDNVPSEEVVKKMKNYWRQLLNAKLITQRKFDNLTKAERGGLSELDKAGFIKRQLVETRQITKHVAQILDSRMNTKYDENDKLIREVKVITLKSKLVSDFRKDFQFYKVREINNYHHAHDAYLNAVVGTALIKKYPKLESEFVYGDYKVYDVRKMIAKSEQEIGKATAKYFFYSNIMNFFKTEITLANGEIRKRPLIETNGETGEIVWDKGRDFATVRKVLSMPQVNIVKKTEVQTGGFSKESILPKRNSDKLIARKKDWDPKKYGGFDSPTVAYSVLVVAKVEKGKSKKLKSVKELLGITIMERSSFEKNPIDFLEAKGYKEVKKDLIIKLPKYSLFELENGRKRMLASAGELQKGNELALPSKYVNFLYLASHYEKLKGSPEDNEQKQLFVEQHKHYLDEIIEQISEFSKRVILADANLDKVLSAYNKHRDKPIREQAENIIHLFTLTNLGAPAAFKYFDTTIDRKRYTSTKEVLDATLIHQSITGLYETRIDLSQLGGDEGADKRTADGSEFESPKKKRKV

SEQ ID NO: 338 - protein, 1786 aa, synthetic construct
  REGION 1..1786: note = ABE8.17-d polypeptide sequence
  REGION 1..167: note = MISC_FEATURE - Adenosine deaminase sequence
  REGION 168..199: note = MISC_FEATURE - Linker sequence
  REGION 200..365: note = MISC_FEATURE - Adenosine deaminase sequence
  REGION 366..397: note = MISC_FEATURE - Linker sequence
  REGION 398..1764: note = MISC_FEATURE - Sequence derived from Cas9
  REGION 1765..1786: note = MISC_FEATURE - Bipartite nuclear localization sequence
MSEVEFSHEYWMRHALTLAKRAWDEREVPVGAVLVHNNRVIGEGWNRPIGRHDPTAHAEIMALRQGGLVMQNYRLIDATLYVTLEPCVMCAGAMIHSRIGRVVFGARDAKTGAAGSLMDVLHHPGMNHRVEITEGILADECAALLSDFFRMRRQEIKAQKKAQSSTDSGGSSGGSSGSETPGTSESATPESSGGSSGGSSEVEFSHEYWMRHALTLAKRARDEREVPVGAVLVLNNRVIGEGWNRAIGLHDPTAHAEIMALRQGGLVMQNYRLIDATLYSTFEPCVMCAGAMIHSRIGRVVFGVRNAKTGAAGSLMDVLHYPGMNHRVEITEGILADECAALLCYFFRMPRRVFNAQKKAQSSTDSGGSSGGSSGSETPGTSESATPESSGGSSGGSDKKYSIGLAIGTNSVGWAVITDEYKVPSKKFKVLGNTDRHSIKKNLIGALLFDSGETAEATRLKRTARRRYTRRKNRICYLQEIFSNEMAKVDDSFFHRLEESFLVEEDKKHERHPIFGNIVDEVAYHEKYPTIYHLRKKLVDSTDKADLRLIYLALAHMIKFRGHFLIEGDLNPDNSDVDKLFIQLVQTYNQLFEENPINASGVDAKAILSARLSKSRRLENLIAQLPGEKKNGLFGNLIALSLGLTPNFKSNFDLAEDAKLQLSKDTYDDDLDNLLAQIGDQYADLFLAAKNLSDAILLSDILRVNTEITKAPLSASMIKRYDEHHQDLTLLKALVRQQLPEKYKEIFFDQSKNGYAGYIDGGASQEEFYKFIKPILEKMDGTEELLVKLNREDLLRKQRTFDNGSIPHQIHLGELHAILRRQEDFYPFLKDNREKIEKILTFRIPYYVGPLARGNSRFAWMTRKSEETITPWNFEEVVDKGASAQSFIERMTNFDKNLPNEKVLPKHSLLYEYFTVYNELTKVKYVTEGMRKPAFLSGEQKKAIVDLLFKTNRKVTVKQLKEDYFKKIECFDSVEISGVEDRFNASLGTYHDLLKIIKDKDFLDNEENEDILEDIVLTLTLFEDREMIEERLKTYAHLFDDKVMKQLKRRRYTGWGRLSRKLINGIRDKQSGKTILDFLKSDGFANRNFMQLIHDDSLTFKEDIQKAQVSGQGDSLHEHIANLAGSPAIKKGILQTVKVVDELVKVMGRHKPENIVIEMARENQTTQKGQKNSRERMKRIEEGIKELGSQILKEHPVENTQLQNEKLYLYYLQNGRDMYVDQELDINRLSDYDVDHIVPQSFLKDDSIDNKVLTRSDKNRGKSDNVPSEEVVKKMKNYWRQLLNAKLITQRKFDNLTKAERGGLSELDKAGFIKRQLVETRQITKHVAQILDSRMNTKYDENDKLIREVKVITLKSKLVSDFRKDFQFYKVREINNYHHAHDAYLNAVVGTALIKKYPKLESEFVYGDYKVYDVRKMIAKSEQEIGKATAKYFFYSNIMNFFKTEITLANGEIRKRPLIETNGETGEIVWDKGRDFATVRKVLSMPQVNIVKKTEVQTGGFSKESILPKRNSDKLIARKKDWDPKKYGGFDSPTVAYSVLVVAKVEKGKSKKLKSVKELLGITIMERSSFEKNPIDFLEAKGYKEVKKDLIIKLPKYSLFELENGRKRMLASAGELQKGNELALPSKYVNFLYLASHYEKLKGSPEDNEQKQLFVEQHKHYLDEIIEQISEFSKRVILADANLDKVLSAYNKHRDKPIREQAENIIHLFTLTNLGAPAAFKYFDTTIDRKRYTSTKEVLDATLIHQSITGLYETRIDLSQLGGDEGADKRTADGSEFESPKKKRKV

SEQ ID NO: 339 - protein, 1588 aa, synthetic construct
  REGION 1..1588: note = ABE8.20-m polypeptide sequence
  REGION 1..167: note = MISC_FEATURE - Adenosine deaminase sequence
  REGION 168..199: note = MISC_FEATURE - Linker sequence
  REGION 200..1566: note = MISC_FEATURE - Sequence derived from Cas9
  REGION 1567..1588: note = MISC_FEATURE - Bipartite nuclear localization sequence
MSEVEFSHEYWMRHALTLAKRARDEREVPVGAVLVLNNRVIGEGWNRAIGLHDPTAHAEIMALRQGGLVMQNYRLYDATLYSTFEPCVMCAGAMIHSRIGRVVFGVRNAKTGAAGSLMDVLHHPGMNHRVEITEGILADECAALLCRFFRMPRRVFNAQKKAQSSTDSGGSSGGSSGSETPGTSESATPESSGGSSGGSDKKYSIGLAIGTNSVGWAVITDEYKVPSKKFKVLGNTDRHSIKKNLIGALLFDSGETAEATRLKRTARRRYTRRKNRICYLQEIFSNEMAKVDDSFFHRLEESFLVEEDKKHERHPIFGNIVDEVAYHEKYPTIYHLRKKLVDSTDKADLRLIYLALAHMIKFRGHFLIEGDLNPDNSDVDKLFIQLVQTYNQLFEENPINASGVDAKAILSARLSKSRRLENLIAQLPGEKKNGLFGNLIALSLGLTPNFKSNFDLAEDAKLQLSKDTYDDDLDNLLAQIGDQYADLFLAAKNLSDAILLSDILRVNTEITKAPLSASMIKRYDEHHQDLTLLKALVRQQLPEKYKEIFFDQSKNGYAGYIDGGASQEEFYKFIKPILEKMDGTEELLVKLNREDLLRKQRTFDNGSIPHQIHLGELHAILRRQEDFYPFLKDNREKIEKILTFRIPYYVGPLARGNSRFAWMTRKSEETITPWNFEEVVDKGASAQSFIERMTNFDKNLPNEKVLPKHSLLYEYFTVYNELTKVKYVTEGMRKPAFLSGEQKKAIVDLLFKTNRKVTVKQLKEDYFKKIECFDSVEISGVEDRFNASLGTYHDLLKIIKDKDFLDNEENEDILEDIVLTLTLFEDREMIEERLKTYAHLFDDKVMKQLKRRRYTGWGRLSRKLINGIRDKQSGKTILDFLKSDGFANRNFMQLIHDDSLTFKEDIQKAQVSGQGDSLHEHIANLAGSPAIKKGILQTVKVVDELVKVMGRHKPENIVIEMARENQTTQKGQKNSRERMKRIEEGIKELGSQILKEHPVENTQLQNEKLYLYYLQNGRDMYVDQELDINRLSDYDVDHIVPQSFLKDDSIDNKVLTRSDKNRGKSDNVPSEEVVKKMKNYWRQLLNAKLITQRKFDNLTKAERGGLSELDKAGFIKRQLVETRQITKHVAQILDSRMNTKYDENDKLIREVKVITLKSKLVSDFRKDFQFYKVREINNYHHAHDAYLNAVVGTALIKKYPKLESEFVYGDYKVYDVRKMIAKSEQEIGKATAKYFFYSNIMNFFKTEITLANGEIRKRPLIETNGETGEIVWDKGRDFATVRKVLSMPQVNIVKKTEVQTGGFSKESILPKRNSDKLIARKKDWDPKKYGGFDSPTVAYSVLVVAKVEKGKSKKLKSVKELLGITIMERSSFEKNPIDFLEAKGYKEVKKDLIIKLPKYSLFELENGRKRMLASAGELQKGNELALPSKYVNFLYLASHYEKLKGSPEDNEQKQLFVEQHKHYLDEIIEQISEFSKRVILADANLDKVLSAYNKHRDKPIREQAENIIHLFTLTNLGAPAAFKYFDTTIDRKRYTSTKEVLDATLIHQSITGLYETRIDLSQLGGDEGADKRTADGSEFESPKKKRKV

SEQ ID NO: 340 - protein, 1786 aa, synthetic construct
  REGION 1..1786: note = ABE8.20-d polypeptide sequence
  REGION 1..167: note = MISC_FEATURE - Adenosine deaminase sequence
  REGION 168..199: note = MISC_FEATURE - Linker sequence
  REGION 200..365: note = MISC_FEATURE - Adenosine deaminase sequence
  REGION 366..397: note = MISC_FEATURE - Linker sequence
  REGION 398..1764: note = MISC_FEATURE - Sequence derived from Cas9
  REGION 1765..1786: note = MISC_FEATURE - Bipartite nuclear localization sequence
MSEVEFSHEYWMRHALTLAKRAWDEREVPVGAVLVHNNRVIGEGWNRPIGRHDPTAHAEIMALRQGGLVMQNYRLIDATLYVTLEPCVMCAGAMIHSRIGRVVFGARDAKTGAAGSLMDVLHHPGMNHRVEITEGILADECAALLSDFFRMRRQEIKAQKKAQSSTDSGGSSGGSSGSETPGTSESATPESSGGSSGGSSEVEFSHEYWMRHALTLAKRARDEREVPVGAVLVLNNRVIGEGWNRAIGLHDPTAHAEIMALRQGGLVMQNYRLYDATLYSTFEPCVMCAGAMIHSRIGRVVFGVRNAKTGAAGSLMDVLHHPGMNHRVEITEGILADECAALLCRFFRMPRRVFNAQKKAQSSTDSGGSSGGSSGSETPGTSESATPESSGGSSGGSDKKYSIGLAIGTNSVGWAVITDEYKVPSKKFKVLGNTDRHSIKKNLIGALLFDSGETAEATRLKRTARRRYTRRKNRICYLQEIFSNEMAKVDDSFFHRLEESFLVEEDKKHERHPIFGNIVDEVAYHEKYPTIYHLRKKLVDSTDKADLRLIYLALAHMIKFRGHFLIEGDLNPDNSDVDKLFIQLVQTYNQLFEENPINASGVDAKAILSARLSKSRRLENLIAQLPGEKKNGLFGNLIALSLGLTPNFKSNFDLAEDAKLQLSKDTYDDDLDNLLAQIGDQYADLFLAAKNLSDAILLSDILRVNTEITKAPLSASMIKRYDEHHQDLTLLKALVRQQLPEKYKEIFFDQSKNGYAGYIDGGASQEEFYKFIKPILEKMDGTEELLVKLNREDLLRKQRTFDNGSIPHQIHLGELHAILRRQEDFYPFLKDNREKIEKILTFRIPYYVGPLARGNSRFAWMTRKSEETITPWNFEEVVDKGASAQSFIERMTNFDKNLPNEKVLPKHSLLYEYFTVYNELTKVKYVTEGMRKPAFLSGEQKKAIVDLLFKTNRKVTVKQLKEDYFKKIECFDSVEISGVEDRFNASLGTYHDLLKIIKDKDFLDNEENEDILEDIVLTLTLFEDREMIEERLKTYAHLFDDKVMKQLKRRRYTGWGRLSRKLINGIRDKQSGKTILDFLKSDGFANRNFMQLIHDDSLTFKEDIQKAQVSGQGDSLHEHIANLAGSPAIKKGILQTVKVVDELVKVMGRHKPENIVIEMARENQTTQKGQKNSRERMKRIEEGIKELGSQILKEHPVENTQLQNEKLYLYYLQNGRDMYVDQELDINRLSDYDVDHIVPQSFLKDDSIDNKVLTRSDKNRGKSDNVPSEEVVKKMKNYWRQLLNAKLITQRKFDNLTKAERGGLSELDKAGFIKRQLVETRQITKHVAQILDSRMNTKYDENDKLIREVKVITLKSKLVSDFRKDFQFYKVREINNYHHAHDAYLNAVVGTALIKKYPKLESEFVYGDYKVYDVRKMIAKSEQEIGKATAKYFFYSNIMNFFKTEITLANGEIRKRPLIETNGETGEIVWDKGRDFATVRKVLSMPQVNIVKKTEVQTGGFSKESILPKRNSDKLIARKKDWDPKKYGGFDSPTVAYSVLVVAKVEKGKSKKLKSVKELLGITIMERSSFEKNPIDFLEAKGYKEVKKDLIIKLPKYSLFELENGRKRMLASAGELQKGNELALPSKYVNFLYLASHYEKLKGSPEDNEQKQLFVEQHKHYLDEIIEQISEFSKRVILADANLDKVLSAYNKHRDKPIREQAENIIHLFTLTNLGAPAAFKYFDTTIDRKRYTSTKEVLDATLIHQSITGLYETRIDLSQLGGDEGADKRTADGSEFESPKKKRKV

SEQ ID NO: 341 - protein, 1588 aa, synthetic construct
  REGION 1..1588: note = 01. monoABE8.1_bpNLS + Y147T polypeptide sequence
MSEVEFSHEYWMRHALTLAKRARDEREVPVGAVLVLNNRVIGEGWNRAIGLHDPTAHAEIMALRQGGLVMQNYRLIDATLYVTFEPCVMCAGAMIHSRIGRVVFGVRNAKTGAAGSLMDVLHYPGMNHRVEITEGILADECAALLCTFFRMPRQVFNAQKKAQSSTDSGGSSGGSSGSETPGTSESATPESSGGSSGGSDKKYSIGLAIGTNSVGWAVITDEYKVPSKKFKVLGNTDRHSIKKNLIGALLFDSGETAEATRLKRTARRRYTRRKNRICYLQEIFSNEMAKVDDSFFHRLEESFLVEEDKKHERHPIFGNIVDEVAYHEKYPTIYHLRKKLVDSTDKADLRLIYLALAHMIKFRGHFLIEGDLNPDNSDVDKLFIQLVQTYNQLFEENPINASGVDAKAILSARLSKSRRLENLIAQLPGEKKNGLFGNLIALSLGLTPNFKSNFDLAEDAKLQLSKDTYDDDLDNLLAQIGDQYADLFLAAKNLSDAILLSDILRVNTEITKAPLSASMIKRYDEHHQDLTLLKALVRQQLPEKYKEIFFDQSKNGYAGYIDGGASQEEFYKFIKPILEKMDGTEELLVKLNREDLLRKQRTFDNGSIPHQIHLGELHAILRRQEDFYPFLKDNREKIEKILTFRIPYYVGPLARGNSRFAWMTRKSEETITPWNFEEVVDKGASAQSFIERMTNFDKNLPNEKVLPKHSLLYEYFTVYNELTKVKYVTEGMRKPAFLSGEQKKAIVDLLFKTNRKVTVKQLKEDYFKKIECFDSVEISGVEDRFNASLGTYHDLLKIIKDKDFLDNEENEDILEDIVLTLTLFEDREMIEERLKTYAHLFDDKVMKQLKRRRYTGWGRLSRKLINGIRDKQSGKTILDFLKSDGFANRNFMQLIHDDSLTFKEDIQKAQVSGQGDSLHEHIANLAGSPAIKKGILQTVKVVDELVKVMGRHKPENIVIEMARENQTTQKGQKNSRERMKRIEEGIKELGSQILKEHPVENTQLQNEKLYLYYLQNGRDMYVDQELDINRLSDYDVDHIVPQSFLKDDSIDNKVLTRSDKNRGKSDNVPSEEVVKKMKNYWRQLLNAKLITQRKFDNLTKAERGGLSELDKAGFIKRQLVETRQITKHVAQILDSRMNTKYDENDKLIREVKVITLKSKLVSDFRKDFQFYKVREINNYHHAHDAYLNAVVGTALIKKYPKLESEFVYGDYKVYDVRKMIAKSEQEIGKATAKYFFYSNIMNFFKTEITLANGEIRKRPLIETNGETGEIVWDKGRDFATVRKVLSMPQVNIVKKTEVQTGGFSKESILPKRNSDKLIARKKDWDPKKYGGFVSPTVAYSVLVVAKVEKGKSKKLKSVKELLGITIMERSSFEKNPIDFLEAKGYKEVKKDLIIKLPKYSLFELENGRKRMLASARELQKGNELALPSKYVNFLYLASHYEKLKGSPEDNEQKQLFVEQHKHYLDEIIEQISEFSKRVILADANLDKVLSAYNKHRDKPIREQAENIIHLFTLTNLGAPAAFKYFDTTIDRKQYRSTKEVLDATLIHQSITGLYETRIDLSQLGGDEGADKRTADGSEFESPKKKRKV

SEQ ID NO: 342 - protein, 1588 aa, synthetic construct
  REGION 1..1588: note = 02. monoABE8.1_bpNLS + Y147R polypeptide sequence
MSEVEFSHEYWMRHALTLAKRARDEREVPVGAVLVLNNRVIGEGWNRAIGLHDPTAHAEIMALRQGGLVMQNYRLIDATLYVTFEPCVMCAGAMIHSRIGRVVFGVRNAKTGAAGSLMDVLHYPGMNHRVEITEGILADECAALLCRFFRMPRQVFNAQKKAQSSTDSGGSSGGSSGSETPGTSESATPESSGGSSGGSDKKYSIGLAIGTNSVGWAVITDEYKVPSKKFKVLGNTDRHSIKKNLIGALLFDSGETAEATRLKRTARRRYTRRKNRICYLQEIFSNEMAKVDDSFFHRLEESFLVEEDKKHERHPIFGNIVDEVAYHEKYPTIYHLRKKLVDSTDKADLRLIYLALAHMIKFRGHFLIEGDLNPDNSDVDKLFIQLVQTYNQLFEENPINASGVDAKAILSARLSKSRRLENLIAQLPGEKKNGLFGNLIALSLGLTPNFKSNFDLAEDAKLQLSKDTYDDDLDNLLAQIGDQYADLFLAAKNLSDAILLSDILRVNTEITKAPLSASMIKRYDEHHQDLTLLKALVRQQLPEKYKEIFFDQSKNGYAGYIDGGASQEEFYKFIKPILEKMDGTEELLVKLNREDLLRKQRTFDNGSIPHQIHLGELHAILRRQEDFYPFLKDNREKIEKILTFRIPYYVGPLARGNSRFAWMTRKSEETITPWNFEEVVDKGASAQSFIERMTNFDKNLPNEKVLPKHSLLYEYFTVYNELTKVKYVTEGMRKPAFLSGEQKKAIVDLLFKTNRKVTVKQLKEDYFKKIECFDSVEISGVEDRFNASLGTYHDLLKIIKDKDFLDNEENEDILEDIVLTLTLFEDREMIEERLKTYAHLFDDKVMKQLKRRRYTGWGRLSRKLINGIRDKQSGKTILDFLKSDGFANRNFMQLIHDDSLTFKEDIQKAQVSGQGDSLHEHIANLAGSPAIKKGILQTVKVVDELVKVMGRHKPENIVIEMARENQTTQKGQKNSRERMKRIEEGIKELGSQILKEHPVENTQLQNEKLYLYYLQNGRDMYVDQELDINRLSDYDVDHIVPQSFLKDDSIDNKVLTRSDKNRGKSDNVPSEEVVKKMKNYWRQLLNAKLITQRKFDNLTKAERGGLSELDKAGFIKRQLVETRQITKHVAQILDSRMNTKYDENDKLIREVKVITLKSKLVSDFRKDFQFYKVREINNYHHAHDAYLNAVVGTALIKKYPKLESEFVYGDYKVYDVRKMIAKSEQEIGKATAKYFFYSNIMNFFKTEITLANGEIRKRPLIETNGETGEIVWDKGRDFATVRKVLSMPQVNIVKKTEVQTGGFSKESILPKRNSDKLIARKKDWDPKKYGGFVSPTVAYSVLVVAKVEKGKSKKLKSVKELLGITIMERSSFEKNPIDFLEAKGYKEVKKDLIIKLPKYSLFELENGRKRMLASARELQKGNELALPSKYVNFLYLASHYEKLKGSPEDNEQKQLFVEQHKHYLDEIIEQISEFSKRVILADANLDKVLSAYNKHRDKPIREQAENIIHLFTLTNLGAPAAFKYFDTTIDRKQYRSTKEVLDATLIHQSITGLYETRIDLSQLGGDEGADKRTADGSEFESPKKKRKV

SEQ ID NO: 343 - protein, 1588 aa, synthetic construct
  REGION 1..1588: note = 03. monoABE8.1_bpNLS + Q154S polypeptide sequence
MSEVEFSHEYWMRHALTLAKRARDEREVPVGAVLVLNNRVIGEGWNRAIGLHDPTAHAEIMALRQGGLVMQNYRLIDATLYVTFEPCVMCAGAMIHSRIGRVVFGVRNAKTGAAGSLMDVLHYPGMNHRVEITEGILADECAALLCYFFRMPRSVFNAQKKAQSSTDSGGSSGGSSGSETPGTSESATPESSGGSSGGSDKKYSIGLAIGTNSVGWAVITDEYKVPSKKFKVLGNTDRHSIKKNLIGALLFDSGETAEATRLKRTARRRYTRRKNRICYLQEIFSNEMAKVDDSFFHRLEESFLVEEDKKHERHPIFGNIVDEVAYHEKYPTIYHLRKKLVDSTDKADLRLIYLALAHMIKFRGHFLIEGDLNPDNSDVDKLFIQLVQTYNQLFEENPINASGVDAKAILSARLSKSRRLENLIAQLPGEKKNGLFGNLIALSLGLTPNFKSNFDLAEDAKLQLSKDTYDDDLDNLLAQIGDQYADLFLAAKNLSDAILLSDILRVNTEITKAPLSASMIKRYDEHHQDLTLLKALVRQQLPEKYKEIFFDQSKNGYAGYIDGGASQEEFYKFIKPILEKMDGTEELLVKLNREDLLRKQRTFDNGSIPHQIHLGELHAILRRQEDFYPFLKDNREKIEKILTFRIPYYVGPLARGNSRFAWMTRKSEETITPWNFEEVVDKGASAQSFIERMTNFDKNLPNEKVLPKHSLLYEYFTVYNELTKVKYVTEGMRKPAFLSGEQKKAIVDLLFKTNRKVTVKQLKEDYFKKIECFDSVEISGVEDRFNASLGTYHDLLKIIKDKDFLDNEENEDILEDIVLTLTLFEDREMIEERLKTYAHLFDDKVMKQLKRRRYTGWGRLSRKLINGIRDKQSGKTILDFLKSDGFANRNFMQLIHDDSLTFKEDIQKAQVSGQGDSLHEHIANLAGSPAIKKGILQTVKVVDELVKVMGRHKPENIVIEMARENQTTQKGQKNSRERMKRIEEGIKELGSQILKEHPVENTQLQNEKLYLYYLQNGRDMYVDQELDINRLSDYDVDHIVPQSFLKDDSIDNKVLTRSDKNRGKSDNVPSEEVVKKMKNYWRQLLNAKLITQRKFDNLTKAERGGLSELDKAGFIKRQLVETRQITKHVAQILDSRMNTKYDENDKLIREVKVITLKSKLVSDFRKDFQFYKVREINNYHHAHDAYLNAVVGTALIKKYPKLESEFVYGDYKVYDVRKMIAKSEQEIGKATAKYFFYSNIMNFFKTEITLANGEIRKRPLIETNGETGEIVWDKGRDFATVRKVLSMPQVNIVKKTEVQTGGFSKESILPKRNSDKLIARKKDWDPKKYGGFVSPTVAYSVLVVAKVEKGKSKKLKSVKELLGITIMERSSFEKNPIDFLEAKGYKEVKKDLIIKLPKYSLFELENGRKRMLASARELQKGNELALPSKYVNFLYLASHYEKLKGSPEDNEQKQLFVEQHKHYLDEIIEQISEFSKRVILADANLDKVLSAYNKHRDKPIREQAENIIHLFTLTNLGAPAAFKYFDTTIDRKQYRSTKEVLDATLIHQSITGLYETRIDLSQLGGDEGADKRTADGSEFESPKKKRKV

SEQ ID NO: 344 - protein, 1588 aa, synthetic construct
  REGION 1..1588: note = 04. monoABE8.1_bpNLS + Y123H polypeptide sequence
MSEVEFSHEYWMRHALTLAKRARDEREVPVGAVLVLNNRVIGEGWNRAIGLHDPTAHAEIMALRQGGLVMQNYRLIDATLYVTFEPCVMCAGAMIHSRIGRVVFGVRNAKTGAAGSLMDVLHHPGMNHRVEITEGILADECAALLCYFFRMPRQVFNAQKKAQSSTDSGGSSGGSSGSETPGTSESATPESSGGSSGGSDKKYSIGLAIGTNSVGWAVITDEYKVPSKKFKVLGNTDRHSIKKNLIGALLFDSGETAEATRLKRTARRRYTRRKNRICYLQEIFSNEMAKVDDSFFHRLEESFLVEEDKKHERHPIFGNIVDEVAYHEKYPTIYHLRKKLVDSTDKADLRLIYLALAHMIKFRGHFLIEGDLNPDNSDVDKLFIQLVQTYNQLFEENPINASGVDAKAILSARLSKSRRLENLIAQLPGEKKNGLFGNLIALSLGLTPNFKSNFDLAEDAKLQLSKDTYDDDLDNLLAQIGDQYADLFLAAKNLSDAILLSDILRVNTEITKAPLSASMIKRYDEHHQDLTLLKALVRQQLPEKYKEIFFDQSKNGYAGYIDGGASQEEFYKFIKPILEKMDGTEELLVKLNREDLLRKQRTFDNGSIPHQIHLGELHAILRRQEDFYPFLKDNREKIEKILTFRIPYYVGPLARGNSRFAWMTRKSEETITPWNFEEVVDKGASAQSFIERMTNFDKNLPNEKVLPKHSLLYEYFTVYNELTKVKYVTEGMRKPAFLSGEQKKAIVDLLFKTNRKVTVKQLKEDYFKKIECFDSVEISGVEDRFNASLGTYHDLLKIIKDKDFLDNEENEDILEDIVLTLTLFEDREMIEERLKTYAHLFDDKVMKQLKRRRYTGWGRLSRKLINGIRDKQSGKTILDFLKSDGFANRNFMQLIHDDSLTFKEDIQKAQVSGQGDSLHEHIANLAGSPAIKKGILQTVKVVDELVKVMGRHKPENIVIEMARENQTTQKGQKNSRERMKRIEEGIKELGSQILKEHPVENTQLQNEKLYLYYLQNGRDMYVDQELDINRLSDYDVDHIVPQSFLKDDSIDNKVLTRSDKNRGKSDNVPSEEVVKKMKNYWRQLLNAKLITQRKFDNLTKAERGGLSELDKAGFIKRQLVETRQITKHVAQILDSRMNTKYDENDKLIREVKVITLKSKLVSDFRKDFQFYKVREINNYHHAHDAYLNAVVGTALIKKYPKLESEFVYGDYKVYDVRKMIAKSEQEIGKATAKYFFYSNIMNFFKTEITLANGEIRKRPLIETNGETGEIVWDKGRDFATVRKVLSMPQVNIVKKTEVQTGGFSKESILPKRNSDKLIARKKDWDPKKYGGFVSPTVAYSVLVVAKVEKGKSKKLKSVKELLGITIMERSSFEKNPIDFLEAKGYKEVKKDLIIKLPKYSLFELENGRKRMLASARELQKGNELALPSKYVNFLYLASHYEKLKGSPEDNEQKQLFVEQHKHYLDEIIEQISEFSKRVILADANLDKVLSAYNKHRDKPIREQAENIIHLFTLTNLGAPAAFKYFDTTIDRKQYRSTKEVLDATLIHQSITGLYETRIDLSQLGGDEGADKRTADGSEFESPKKKRKV

SEQ ID NO: 345 - protein, 1588 aa, synthetic construct
  REGION 1..1588: note = 05. monoABE8.1_bpNLS + V82S polypeptide sequence
MSEVEFSHEYWMRHALTLAKRARDEREVPVGAVLVLNNRVIGEGWNRAIGLHDPTAHAEIMALRQGGLVMQNYRLIDATLYSTFEPCVMCAGAMIHSRIGRVVFGVRNAKTGAAGSLMDVLHYPGMNHRVEITEGILADECAALLCYFFRMPRQVFNAQKKAQSSTDSGGSSGGSSGSETPGTSESATPESSGGSSGGSDKKYSIGLAIGTNSVGWAVITDEYKVPSKKFKVLGNTDRHSIKKNLIGALLFDSGETAEATRLKRTARRRYTRRKNRICYLQEIFSNEMAKVDDSFFHRLEESFLVEEDKKHERHPIFGNIVDEVAYHEKYPTIYHLRKKLVDSTDKADLRLIYLALAHMIKFRGHFLIEGDLNPDNSDVDKLFIQLVQTYNQLFEENPINASGVDAKAILSARLSKSRRLENLIAQLPGEKKNGLFGNLIALSLGLTPNFKSNFDLAEDAKLQLSKDTYDDDLDNLLAQIGDQYADLFLAAKNLSDAILLSDILRVNTEITKAPLSASMIKRYDEHHQDLTLLKALVRQQLPEKYKEIFFDQSKNGYAGYIDGGASQEEFYKFIKPILEKMDGTEELLVKLNREDLLRKQRTFDNGSIPHQIHLGELHAILRRQEDFYPFLKDNREKIEKILTFRIPYYVGPLARGNSRFAWMTRKSEETITPWNFEEVVDKGASAQSFIERMTNFDKNLPNEKVLPKHSLLYEYFTVYNELTKVKYVTEGMRKPAFLSGEQKKAIVDLLFKTNRKVTVKQLKEDYFKKIECFDSVEISGVEDRFNASLGTYHDLLKIIKDKDFLDNEENEDILEDIVLTLTLFEDREMIEERLKTYAHLFDDKVMKQLKRRRYTGWGRLSRKLINGIRDKQSGKTILDFLKSDGFANRNFMQLIHDDSLTFKEDIQKAQVSGQGDSLHEHIANLAGSPAIKKGILQTVKVVDELVKVMGRHKPENIVIEMARENQTTQKGQKNSRERMKRIEEGIKELGSQILKEHPVENTQLQNEKLYLYYLQNGRDMYVDQELDINRLSDYDVDHIVPQSFLKDDSIDNKVLTRSDKNRGKSDNVPSEEVVKKMKNYWRQLLNAKLITQRKFDNLTKAERGGLSELDKAGFIKRQLVETRQITKHVAQILDSRMNTKYDENDKLIREVKVITLKSKLVSDFRKDFQFYKVREINNYHHAHDAYLNAVVGTALIKKYPKLESEFVYGDYKVYDVRKMIAKSEQEIGKATAKYFFYSNIMNFFKTEITLANGEIRKRPLIETNGETGEIVWDKGRDFATVRKVLSMPQVNIVKKTEVQTGGFSKESILPKRNSDKLIARKKDWDPKKYGGFVSPTVAYSVLVVAKVEKGKSKKLKSVKELLGITIMERSSFEKNPIDFLEAKGYKEVKKDLIIKLPKYSLFELENGRKRMLASARELQKGNELALPSKYVNFLYLASHYEKLKGSPEDNEQKQLFVEQHKHYLDEIIEQISEFSKRVILADANLDKVLSAYNKHRDKPIREQAENIIHLFTLTNLGAPAAFKYFDTTIDRKQYRSTKEVLDATLIHQSITGLYETRIDLSQLGGDEGADKRTADGSEFESPKKKRKV

SEQ ID NO: 346 - protein, 1588 aa, synthetic construct
  REGION 1..1588: note = 06. monoABE8.1_bpNLS + T166R polypeptide sequence
MSEVEFSHEYWMRHALTLAKRARDEREVPVGAVLVLNNRVIGEGWNRAIGLHDPTAHAEIMALRQGGLVMQNYRLIDATLYVTFEPCVMCAGAMIHSRIGRVVFGVRNAKTGAAGSLMDVLHYPGMNHRVEITEGILADECAALLCYFFRMPRQVFNAQKKAQSSRDSGGSSGGSSGSETPGTSESATPESSGGSSGGSDKKYSIGLAIGTNSVGWAVITDEYKVPSKKFKVLGNTDRHSIKKNLIGALLFDSGETAEATRLKRTARRRYTRRKNRICYLQEIFSNEMAKVDDSFFHRLEESFLVEEDKKHERHPIFGNIVDEVAYHEKYPTIYHLRKKLVDSTDKADLRLIYLALAHMIKFRGHFLIEGDLNPDNSDVDKLFIQLVQTYNQLFEENPINASGVDAKAILSARLSKSRRLENLIAQLPGEKKNGLFGNLIALSLGLTPNFKSNFDLAEDAKLQLSKDTYDDDLDNLLAQIGDQYADLFLAAKNLSDAILLSDILRVNTEITKAPLSASMIKRYDEHHQDLTLLKALVRQQLPEKYKEIFFDQSKNGYAGYIDGGASQEEFYKFIKPILEKMDGTEELLVKLNREDLLRKQRTFDNGSIPHQIHLGELHAILRRQEDFYPFLKDNREKIEKILTFRIPYYVGPLARGNSRFAWMTRKSEETITPWNFEEVVDKGASAQSFIERMTNFDKNLPNEKVLPKHSLLYEYFTVYNELTKVKYVTEGMRKPAFLSGEQKKAIVDLLFKTNRKVTVKQLKEDYFKKIECFDSVEISGVEDRFNASLGTYHDLLKIIKDKDFLDNEENEDILEDIVLTLTLFEDREMIEERLKTYAHLFDDKVMKQLKRRRYTGWGRLSRKLINGIRDKQSGKTILDFLKSDGFANRNFMQLIHDDSLTFKEDIQKAQVSGQGDSLHEHIANLAGSPAIKKGILQTVKVVDELVKVMGRHKPENIVIEMARENQTTQKGQKNSRERMKRIEEGIKELGSQILKEHPVENTQLQNEKLYLYYLQNGRDMYVDQELDINRLSDYDVDHIVPQSFLKDDSIDNKVLTRSDKNRGKSDNVPSEEVVKKMKNYWRQLLNAKLITQRKFDNLTKAERGGLSELDKAGFIKRQLVETRQITKHVAQILDSRMNTKYDENDKLIREVKVITLKSKLVSDFRKDFQFYKVREINNYHHAHDAYLNAVVGTALIKKYPKLESEFVYGDYKVYDVRKMIAKSEQEIGKATAKYFFYSNIMNFFKTEITLANGEIRKRPLIETNGETGEIVWDKGRDFATVRKVLSMPQVNIVKKTEVQTGGFSKESILPKRNSDKLIARKKDWDPKKYGGFVSPTVAYSVLVVAKVEKGKSKKLKSVKELLGITIMERSSFEKNPIDFLEAKGYKEVKKDLIIKLPKYSLFELENGRKRMLASARELQKGNELALPSKYVNFLYLASHYEKLKGSPEDNEQKQLFVEQHKHYLDEIIEQISEFSKRVILADANLDKVLSAYNKHRDKPIREQAENIIHLFTLTNLGAPAAFKYFDTTIDRKQYRSTKEVLDATLIHQSITGLYETRIDLSQLGGDEGADKRTADGSEFESPKKKRKV

SEQ ID NO: 347 - protein, 1588 aa, synthetic construct
  REGION 1..1588: note = 07. monoABE8.1_bpNLS + Q154R polypeptide sequence
MSEVEFSHEYWMRHALTLAKRARDEREVPVGAVLVLNNRVIGEGWNRAIGLHDPTAHAEIMALRQGGLVMQNYRLIDATLYVTFEPCVMCAGAMIHSRIGRVVFGVRNAKTGAAGSLMDVLHYPGMNHRVEITEGILADECAALLCYFFRMPRRVFNAQKKAQSSTDSGGSSGGSSGSETPGTSESATPESSGGSSGGSDKKYSIGLAIGTNSVGWAVITDEYKVPSKKFKVLGNTDRHSIKKNLIGALLFDSGETAEATRLKRTARRRYTRRKNRICYLQEIFSNEMAKVDDSFFHRLEESFLVEEDKKHERHPIFGNIVDEVAYHEKYPTIYHLRKKLVDSTDKADLRLIYLALAHMIKFRGHFLIEGDLNPDNSDVDKLFIQLVQTYNQLFEENPINASGVDAKAILSARLSKSRRLENLIAQLPGEKKNGLFGNLIALSLGLTPNFKSNFDLAEDAKLQLSKDTYDDDLDNLLAQIGDQYADLFLAAKNLSDAILLSDILRVNTEITKAPLSASMIKRYDEHHQDLTLLKALVRQQLPEKYKEIFFDQSKNGYAGYIDGGASQEEFYKFIKPILEKMDGTEELLVKLNREDLLRKQRTFDNGSIPHQIHLGELHAILRRQEDFYPFLKDNREKIEKILTFRIPYYVGPLARGNSRFAWMTRKSEETITPWNFEEVVDKGASAQSFIERMTNFDKNLPNEKVLPKHSLLYEYFTVYNELTKVKYVTEGMRKPAFLSGEQKKAIVDLLFKTNRKVTVKQLKEDYFKKIECFDSVEISGVEDRFNASLGTYHDLLKIIKDKDFLDNEENEDILEDIVLTLTLFEDREMIEERLKTYAHLFDDKVMKQLKRRRYTGWGRLSRKLINGIRDKQSGKTILDFLKSDGFANRNFMQLIHDDSLTFKEDIQKAQVSGQGDSLHEHIANLAGSPAIKKGILQTVKVVDELVKVMGRHKPENIVIEMARENQTTQKGQKNSRERMKRIEEGIKELGSQILKEHPVENTQLQNEKLYLYYLQNGRDMYVDQELDINRLSDYDVDHIVPQSFLKDDSIDNKVLTRSDKNRGKSDNVPSEEVVKKMKNYWRQLLNAKLITQRKFDNLTKAERGGLSELDKAGFIKRQLVETRQITKHVAQILDSRMNTKYDENDKLIREVKVITLKSKLVSDFRKDFQFYKVREINNYHHAHDAYLNAVVGTALIKKYPKLESEFVYGDYKVYDVRKMIAKSEQEIGKATAKYFFYSNIMNFFKTEITLANGEIRKRPLIETNGETGEIVWDKGRDFATVRKVLSMPQVNIVKKTEVQTGGFSKESILPKRNSDKLIARKKDWDPKKYGGFVSPTVAYSVLVVAKVEKGKSKKLKSVKELLGITIMERSSFEKNPIDFLEAKGYKEVKKDLIIKLPKYSLFELENGRKRMLASARELQKGNELALPSKYVNFLYLASHYEKLKGSPEDNEQKQLFVEQHKHYLDEIIEQISEFSKRVILADANLDKVLSAYNKHRDKPIREQAENIIHLFTLTNLGAPAAFKYFDTTIDRKQYRSTKEVLDATLIHQSITGLYETRIDLSQLGGDEGADKRTADGSEFESPKKKRKV

SEQ ID NO: 348 - protein, 1588 aa, synthetic construct
  REGION 1..1588: note = 08. monoABE8.1_bpNLS +Y147R_Q154R_Y123H polypeptide sequence
MSEVEFSHEYWMRHALTLAKRARDEREVPVGAVLVLNNRVIGEGWNRAIGLHDPTAHAEIMALRQGGLVMQNYRLIDATLYVTFEPCVMCAGAMIHSRIGRVVFGVRNAKTGAAGSLMDVLHHPGMNHRVEITEGILADECAALLCRFFRMPRRVFNAQKKAQSSTDSGGSSGGSSGSETPGTSESATPESSGGSSGGSDKKYSIGLAIGTNSVGWAVITDEYKVPSKKFKVLGNTDRHSIKKNLIGALLFDSGETAEATRLKRTARRRYTRRKNRICYLQEIFSNEMAKVDDSFFHRLEESFLVEEDKKHERHPIFGNIVDEVAYHEKYPTIYHLRKKLVDSTDKADLRLIYLALAHMIKFRGHFLIEGDLNPDNSDVDKLFIQLVQTYNQLFEENPINASGVDAKAILSARLSKSRRLENLIAQLPGEKKNGLFGNLIALSLGLTPNFKSNFDLAEDAKLQLSKDTYDDDLDNLLAQIGDQYADLFLAAKNLSDAILLSDILRVNTEITKAPLSASMIKRYDEHHQDLTLLKALVRQQLPEKYKEIFFDQSKNGYAGYIDGGASQEEFYKFIKPILEKMDGTEELLVKLNREDLLRKQRTFDNGSIPHQIHLGELHAILRRQEDFYPFLKDNREKIEKILTFRIPYYVGPLARGNSRFAWMTRKSEETITPWNFEEVVDKGASAQSFIERMTNFDKNLPNEKVLPKHSLLYEYFTVYNELTKVKYVTEGMRKPAFLSGEQKKAIVDLLFKTNRKVTVKQLKEDYFKKIECFDSVEISGVEDRFNASLGTYHDLLKIIKDKDFLDNEENEDILEDIVLTLTLFEDREMIEERLKTYAHLFDDKVMKQLKRRRYTGWGRLSRKLINGIRDKQSGKTILDFLKSDGFANRNFMQLIHDDSLTFKEDIQKAQVSGQGDSLHEHIANLAGSPAIKKGILQTVKVVDELVKVMGRHKPENIVIEMARENQTTQKGQKNSRERMKRIEEGIKELGSQILKEHPVENTQLQNEKLYLYYLQNGRDMYVDQELDINRLSDYDVDHIVPQSFLKDDSIDNKVLTRSDKNRGKSDNVPSEEVVKKMKNYWRQLLNAKLITQRKFDNLTKAERGGLSELDKAGFIKRQLVETRQITKHVAQILDSRMNTKYDENDKLIREVKVITLKSKLVSDFRKDFQFYKVREINNYHHAHDAYLNAVVGTALIKKYPKLESEFVYGDYKVYDVRKMIAKSEQEIGKATAKYFFYSNIMNFFKTEITLANGEIRKRPLIETNGETGEIVWDKGRDFATVRKVLSMPQVNIVKKTEVQTGGFSKESILPKRNSDKLIARKKDWDPKKYGGFVSPTVAYSVLVVAKVEKGKSKKLKSVKELLGITIMERSSFEKNPIDFLEAKGYKEVKKDLIIKLPKYSLFELENGRKRMLASARELQKGNELALPSKYVNFLYLASHYEKLKGSPEDNEQKQLFVEQHKHYLDEIIEQISEFSKRVILADANLDKVLSAYNKHRDKPIREQAENIIHLFTLTNLGAPAAFKYFDTTIDRKQYRSTKEVLDATLIHQSITGLYETRIDLSQLGGDEGADKRTADGSEFESPKKKRKV

SEQ ID NO: 349 - protein, 1588 aa, synthetic construct
  REGION 1..1588: note = 09. monoABE8.1_bpNLS +Y147R_Q154R_I76Y polypeptide sequence
MSEVEFSHEYWMRHALTLAKRARDEREVPVGAVLVLNNRVIGEGWNRAIGLHDPTAHAEIMALRQGGLVMQNYRLYDATLYVTFEPCVMCAGAMIHSRIGRVVFGVRNAKTGAAGSLMDVLHYPGMNHRVEITEGILADECAALLCRFFRMPRRVFNAQKKAQSSTDSGGSSGGSSGSETPGTSESATPESSGGSSGGSDKKYSIGLAIGTNSVGWAVITDEYKVPSKKFKVLGNTDRHSIKKNLIGALLFDSGETAEATRLKRTARRRYTRRKNRICYLQEIFSNEMAKVDDSFFHRLEESFLVEEDKKHERHPIFGNIVDEVAYHEKYPTIYHLRKKLVDSTDKADLRLIYLALAHMIKFRGHFLIEGDLNPDNSDVDKLFIQLVQTYNQLFEENPINASGVDAKAILSARLSKSRRLENLIAQLPGEKKNGLFGNLIALSLGLTPNFKSNFDLAEDAKLQLSKDTYDDDLDNLLAQIGDQYADLFLAAKNLSDAILLSDILRVNTEITKAPLSASMIKRYDEHHQDLTLLKALVRQQLPEKYKEIFFDQSKNGYAGYIDGGASQEEFYKFIKPILEKMDGTEELLVKLNREDLLRKQRTFDNGSIPHQIHLGELHAILRRQEDFYPFLKDNREKIEKILTFRIPYYVGPLARGNSRFAWMTRKSEETITPWNFEEVVDKGASAQSFIERMTNFDKNLPNEKVLPKHSLLYEYFTVYNELTKVKYVTEGMRKPAFLSGEQKKAIVDLLFKTNRKVTVKQLKEDYFKKIECFDSVEISGVEDRFNASLGTYHDLLKIIKDKDFLDNEENEDILEDIVLTLTLFEDREMIEERLKTYAHLFDDKVMKQLKRRRYTGWGRLSRKLINGIRDKQSGKTILDFLKSDGFANRNFMQLIHDDSLTFKEDIQKAQVSGQGDSLHEHIANLAGSPAIKKGILQTVKVVDELVKVMGRHKPENIVIEMARENQTTQKGQKNSRERMKRIEEGIKELGSQILKEHPVENTQLQNEKLYLYYLQNGRDMYVDQELDINRLSDYDVDHIVPQSFLKDDSIDNKVLTRSDKNRGKSDNVPSEEVVKKMKNYWRQLLNAKLITQRKFDNLTKAERGGLSELDKAGFIKRQLVETRQITKHVAQILDSRMNTKYDENDKLIREVKVITLKSKLVSDFRKDFQFYKVREINNYHHAHDAYLNAVVGTALIKKYPKLESEFVYGDYKVYDVRKMIAKSEQEIGKATAKYFFYSNIMNFFKTEITLANGEIRKRPLIETNGETGEIVWDKGRDFATVRKVLSMPQVNIVKKTEVQTGGFSKESILPKRNSDKLIARKKDWDPKKYGGFVSPTVAYSVLVVAKVEKGKSKKLKSVKELLGITIMERSSFEKNPIDFLEAKGYKEVKKDLIIKLPKYSLFELENGRKRMLASARELQKGNELALPSKYVNFLYLASHYEKLKGSPEDNEQKQLFVEQHKHYLDEIIEQISEFSKRVILADANLDKVLSAYNKHRDKPIREQAENIIHLFTLTNLGAPAAFKYFDTTIDRKQYRSTKEVLDATLIHQSITGLYETRIDLSQLGGDEGADKRTADGSEFESPKKKRKV

SEQ ID NO: 350 - protein, 1588 aa, synthetic construct
  REGION 1..1588: note = 10. monoABE8.1_bpNLS +Y147R_Q154R_T166R polypeptide sequence
MSEVEFSHEYWMRHALTLAKRARDEREVPVGAVLVLNNRVIGEGWNRAIGLHDPTAHAEIMALRQGGLVMQNYRLIDATLYVTFEPCVMCAGAMIHSRIGRVVFGVRNAKTGAAGSLMDVLHYPGMNHRVEITEGILADECAALLCRFFRMPRRVFNAQKKAQSSRDSGGSSGGSSGSETPGTSESATPESSGGSSGGSDKKYSIGLAIGTNSVGWAVITDEYKVPSKKFKVLGNTDRHSIKKNLIGALLFDSGETAEATRLKRTARRRYTRRKNRICYLQEIFSNEMAKVDDSFFHRLEESFLVEEDKKHERHPIFGNIVDEVAYHEKYPTIYHLRKKLVDSTDKADLRLIYLALAHMIKFRGHFLIEGDLNPDNSDVDKLFIQLVQTYNQLFEENPINASGVDAKAILSARLSKSRRLENLIAQLPGEKKNGLFGNLIALSLGLTPNFKSNFDLAEDAKLQLSKDTYDDDLDNLLAQIGDQYADLFLAAKNLSDAILLSDILRVNTEITKAPLSASMIKRYDEHHQDLTLLKALVRQQLPEKYKEIFFDQSKNGYAGYIDGGASQEEFYKFIKPILEKMDGTEELLVKLNREDLLRKQRTFDNGSIPHQIHLGELHAILRRQEDFYPFLKDNREKIEKILTFRIPYYVGPLARGNSRFAWMTRKSEETITPWNFEEVVDKGASAQSFIERMTNFDKNLPNEKVLPKHSLLYEYFTVYNELTKVKYVTEGMRKPAFLSGEQKKAIVDLLFKTNRKVTVKQLKEDYFKKIECFDSVEISGVEDRFNASLGTYHDLLKIIKDKDFLDNEENEDILEDIVLTLTLFEDREMIEERLKTYAHLFDDKVMKQLKRRRYTGWGRLSRKLINGIRDKQSGKTILDFLKSDGFANRNFMQLIHDDSLTFKEDIQKAQVSGQGDSLHEHIANLAGSPAIKKGILQTVKVVDELVKVMGRHKPENIVIEMARENQTTQKGQKNSRERMKRIEEGIKELGSQILKEHPVENTQLQNEKLYLYYLQNGRDMYVDQELDINRLSDYDVDHIVPQSFLKDDSIDNKVLTRSDKNRGKSDNVPSEEVVKKMKNYWRQLLNAKLITQRKFDNLTKAERGGLSELDKAGFIKRQLVETRQITKHVAQILDSRMNTKYDENDKLIREVKVITLKSKLVSDFRKDFQFYKVREINNYHHAHDAYLNAVVGTALIKKYPKLESEFVYGDYKVYDVRKMIAKSEQEIGKATAKYFFYSNIMNFFKTEITLANGEIRKRPLIETNGETGEIVWDKGRDFATVRKVLSMPQVNIVKKTEVQTGGFSKESILPKRNSDKLIARKKDWDPKKYGGFVSPTVAYSVLVVAKVEKGKSKKLKSVKELLGITIMERSSFEKNPIDFLEAKGYKEVKKDLIIKLPKYSLFELENGRKRMLASARELQKGNELALPSKYVNFLYLASHYEKLKGSPEDNEQKQLFVEQHKHYLDEIIEQISEFSKRVILADANLDKVLSAYNKHRDKPIREQAENIIHLFTLTNLGAPAAFKYFDTTIDRKQYRSTKEVLDATLIHQSITGLYETRIDLSQLGGDEGADKRTADGSEFESPKKKRKV

SEQ ID NO: 351 - protein, 1588 aa, synthetic construct
  REGION 1..1588: note = 11. monoABE8.1_bpNLS +Y147T_Q154R polypeptide sequence
MSEVEFSHEYWMRHALTLAKRARDEREVPVGAVLVLNNRVIGEGWNRAIGLHDPTAHAEIMALRQGGLVMQNYRLIDATLYVTFEPCVMCAGAMIHSRIGRVVFGVRNAKTGAAGSLMDVLHYPGMNHRVEITEGILADECAALLCTFFRMPRRVFNAQKKAQSSTDSGGSSGGSSGSETPGTSESATPESSGGSSGGSDKKYSIGLAIGTNSVGWAVITDEYKVPSKKFKVLGNTDRHSIKKNLIGALLFDSGETAEATRLKRTARRRYTRRKNRICYLQEIFSNEMAKVDDSFFHRLEESFLVEEDKKHERHPIFGNIVDEVAYHEKYPTIYHLRKKLVDSTDKADLRLIYLALAHMIKFRGHFLIEGDLNPDNSDVDKLFIQLVQTYNQLFEENPINASGVDAKAILSARLSKSRRLENLIAQLPGEKKNGLFGNLIALSLGLTPNFKSNFDLAEDAKLQLSKDTYDDDLDNLLAQIGDQYADLFLAAKNLSDAILLSDILRVNTEITKAPLSASMIKRYDEHHQDLTLLKALVRQQLPEKYKEIFFDQSKNGYAGYIDGGASQEEFYKFIKPILEKMDGTEELLVKLNREDLLRKQRTFDNGSIPHQIHLGELHAILRRQEDFYPFLKDNREKIEKILTFRIPYYVGPLARGNSRFAWMTRKSEETITPWNFEEVVDKGASAQSFIERMTNFDKNLPNEKVLPKHSLLYEYFTVYNELTKVKYVTEGMRKPAFLSGEQKKAIVDLLFKTNRKVTVKQLKEDYFKKIECFDSVEISGVEDRFNASLGTYHDLLKIIKDKDFLDNEENEDILEDIVLTLTLFEDREMIEERLKTYAHLFDDKVMKQLKRRRYTGWGRLSRKLINGIRDKQSGKTILDFLKSDGFANRNFMQLIHDDSLTFKEDIQKAQVSGQGDSLHEHIANLAGSPAIKKGILQTVKVVDELVKVMGRHKPENIVIEMARENQTTQKGQKNSRERMKRIEEGIKELGSQILKEHPVENTQLQNEKLYLYYLQNGRDMYVDQELDINRLSDYDVDHIVPQSFLKDDSIDNKVLTRSDKNRGKSDNVPSEEVVKKMKNYWRQLLNAKLITQRKFDNLTKAERGGLSELDKAGFIKRQLVETRQITKHVAQILDSRMNTKYDENDKLIREVKVITLKSKLVSDFRKDFQFYKVREINNYHHAHDAYLNAVVGTALIKKYPKLESEFVYGDYKVYDVRKMIAKSEQEIGKATAKYFFYSNIMNFFKTEITLANGEIRKRPLIETNGETGEIVWDKGRDFATVRKVLSMPQVNIVKKTEVQTGGFSKESILPKRNSDKLIARKKDWDPKKYGGFVSPTVAYSVLVVAKVEKGKSKKLKSVKELLGITIMERSSFEKNPIDFLEAKGYKEVKKDLIIKLPKYSLFELENGRKRMLASARELQKGNELALPSKYVNFLYLASHYEKLKGSPEDNEQKQLFVEQHKHYLDEIIEQISEFSKRVILADANLDKVLSAYNKHRDKPIREQAENIIHLFTLTNLGAPAAFKYFDTTIDRKQYRSTKEVLDATLIHQSITGLYETRIDLSQLGGDEGADKRTADGSEFESPKKKRKV

SEQ ID NO: 352 - protein, 1588 aa, synthetic construct
  REGION 1..1588: note = 12. monoABE8.1_bpNLS +Y147T_Q154S polypeptide sequence
MSEVEFSHEYWMRHALTLAKRARDEREVPVGAVLVLNNRVIGEGWNRAIGLHDPTAHAEIMALRQGGLVMQNYRLIDATLYVTFEPCVMCAGAMIHSRIGRVVFGVRNAKTGAAGSLMDVLHYPGMNHRVEITEGILADECAALLCTFFRMPRSVFNAQKKAQSSTDSGGSSGGSSGSETPGTSESATPESSGGSSGGSDKKYSIGLAIGTNSVGWAVITDEYKVPSKKFKVLGNTDRHSIKKNLIGALLFDSGETAEATRLKRTARRRYTRRKNRICYLQEIFSNEMAKVDDSFFHRLEESFLVEEDKKHERHPIFGNIVDEVAYHEKYPTIYHLRKKLVDSTDKADLRLIYLALAHMIKFRGHFLIEGDLNPDNSDVDKLFIQLVQTYNQLFEENPINASGVDAKAILSARLSKSRRLENLIAQLPGEKKNGLFGNLIALSLGLTPNFKSNFDLAEDAKLQLSKDTYDDDLDNLLAQIGDQYADLFLAAKNLSDAILLSDILRVNTEITKAPLSASMIKRYDEHHQDLTLLKALVRQQLPEKYKEIFFDQSKNGYAGYIDGGASQEEFYKFIKPILEKMDGTEELLVKLNREDLLRKQRTFDNGSIPHQIHLGELHAILRRQEDFYPFLKDNREKIEKILTFRIPYYVGPLARGNSRFAWMTRKSEETITPWNFEEVVDKGASAQSFIERMTNFDKNLPNEKVLPKHSLLYEYFTVYNELTKVKYVTEGMRKPAFLSGEQKKAIVDLLFKTNRKVTVKQLKEDYFKKIECFDSVEISGVEDRFNASLGTYHDLLKIIKDKDFLDNEENEDILEDIVLTLTLFEDREMIEERLKTYAHLFDDKVMKQLKRRRYTGWGRLSRKLINGIRDKQSGKTILDFLKSDGFANRNFMQLIHDDSLTFKEDIQKAQVSGQGDSLHEHIANLAGSPAIKKGILQTVKVVDELVKVMGRHKPENIVIEMARENQTTQKGQKNSRERMKRIEEGIKELGSQILKEHPVENTQLQNEKLYLYYLQNGRDMYVDQELDINRLSDYDVDHIVPQSFLKDDSIDNKVLTRSDKNRGKSDNVPSEEVVKKMKNYWRQLLNAKLITQRKFDNLTKAERGGLSELDKAGFIKRQLVETRQITKHVAQILDSRMNTKYDENDKLIREVKVITLKSKLVSDFRKDFQFYKVREINNYHHAHDAYLNAVVGTALIKKYPKLESEFVYGDYKVYDVRKMIAKSEQEIGKATAKYFFYSNIMNFFKTEITLANGEIRKRPLIETNGETGEIVWDKGRDFATVRKVLSMPQVNIVKKTEVQTGGFSKESILPKRNSDKLIARKKDWDPKKYGGFVSPTVAYSVLVVAKVEKGKSKKLKSVKELLGITIMERSSFEKNPIDFLEAKGYKEVKKDLIIKLPKYSLFELENGRKRMLASARELQKGNELALPSKYVNFLYLASHYEKLKGSPEDNEQKQLFVEQHKHYLDEIIEQISEFSKRVILADANLDKVLSAYNKHRDKPIREQAENIIHLFTLTNLGAPAAFKYFDTTIDRKQYRSTKEVLDATLIHQSITGLYETRIDLSQLGGDEGADKRTADGSEFESPKKKRKV

SEQ ID NO: 353 - protein, 1588 aa, synthetic construct
  REGION 1..1588: note = 13. monoABE8.1_bpNLS +H123Y123H_Y147R_Q154R_I76Y polypeptide sequence
MSEVEFSHEYWMRHALTLAKRARDEREVPVGAVLVLNNRVIGEGWNRAIGLHDPTAHAEIMALRQGGLVMQNYRLYDATLYVTFEPCVMCAGAMIHSRIGRVVFGVRNAKTGAAGSLMDVLHHPGMNHRVEITEGILADECAALLCRFFRMPRRVFNAQKKAQSSTDSGGSSGGSSGSETPGTSESATPESSGGSSGGSDKKYSIGLAIGTNSVGWAVITDEYKVPSKKFKVLGNTDRHSIKKNLIGALLFDSGETAEATRLKRTARRRYTRRKNRICYLQEIFSNEMAKVDDSFFHRLEESFLVEEDKKHERHPIFGNIVDEVAYHEKYPTIYHLRKKLVDSTDKADLRLIYLALAHMIKFRGHFLIEGDLNPDNSDVDKLFIQLVQTYNQLFEENPINASGVDAKAILSARLSKSRRLENLIAQLPGEKKNGLFGNLIALSLGLTPNFKSNFDLAEDAKLQLSKDTYDDDLDNLLAQIGDQYADLFLAAKNLSDAILLSDILRVNTEITKAPLSASMIKRYDEHHQDLTLLKALVRQQLPEKYKEIFFDQSKNGYAGYIDGGASQEEFYKFIKPILEKMDGTEELLVKLNREDLLRKQRTFDNGSIPHQIHLGELHAILRRQEDFYPFLKDNREKIEKILTFRIPYYVGPLARGNSRFAWMTRKSEETITPWNFEEVVDKGASAQSFIERMTNFDKNLPNEKVLPKHSLLYEYFTVYNELTKVKYVTEGMRKPAFLSGEQKKAIVDLLFKTNRKVTVKQLKEDYFKKIECFDSVEISGVEDRFNASLGTYHDLLKIIKDKDFLDNEENEDILEDIVLTLTLFEDREMIEERLKTYAHLFDDKVMKQLKRRRYTGWGRLSRKLINGIRDKQSGKTILDFLKSDGFANRNFMQLIHDDSLTFKEDIQKAQVSGQGDSLHEHIANLAGSPAIKKGILQTVKVVDELVKVMGRHKPENIVIEMARENQTTQKGQKNSRERMKRIEEGIKELGSQILKEHPVENTQLQNEKLYLYYLQNGRDMYVDQELDINRLSDYDVDHIVPQSFLKDDSIDNKVLTRSDKNRGKSDNVPSEEVVKKMKNYWRQLLNAKLITQRKFDNLTKAERGGLSELDKAGFIKRQLVETRQITKHVAQILDSRMNTKYDENDKLIREVKVITLKSKLVSDFRKDFQFYKVREINNYHHAHDAYLNAVVGTALIKKYPKLESEFVYGDYKVYDVRKMIAKSEQEIGKATAKYFFYSNIMNFFKTEITLANGEIRKRPLIETNGETGEIVWDKGRDFATVRKVLSMPQVNIVKKTEVQTGGFSKESILPKRNSDKLIARKKDWDPKKYGGFVSPTVAYSVLVVAKVEKGKSKKLKSVKELLGITIMERSSFEKNPIDFLEAKGYKEVKKDLIIKLPKYSLFELENGRKRMLASARELQKGNELALPSKYVNFLYLASHYEKLKGSPEDNEQKQLFVEQHKHYLDEIIEQISEFSKRVILADANLDKVLSAYNKHRDKPIREQAENIIHLFTLTNLGAPAAFKYFDTTIDRKQYRSTKEVLDATLIHQSITGLYETRIDLSQLGGDEGADKRTADGSEFESPKKKRKV

SEQ ID NO: 354 - protein, 1588 aa, synthetic construct
  REGION 1..1588: note = 14. monoABE8.1_bpNLS + V82S +Q154R polypeptide sequence
MSEVEFSHEYWMRHALTLAKRARDEREVPVGAVLVLNNRVIGEGWNRAIGLHDPTAHAEIMALRQGGLVMQNYRLIDATLYSTFEPCVMCAGAMIHSRIGRVVFGVRNAKTGAAGSLMDVLHYPGMNHRVEITEGILADECAALLCYFFRMPRRVFNAQKKAQSSTDSGGSSGGSSGSETPGTSESATPESSGGSSGGSDKKYSIGLAIGTNSVGWAVITDEYKVPSKKFKVLGNTDRHSIKKNLIGALLFDSGETAEATRLKRTARRRYTRRKNRICYLQEIFSNEMAKVDDSFFHRLEESFLVEEDKKHERHPIFGNIVDEVAYHEKYPTIYHLRKKLVDSTDKADLRLIYLALAHMIKFRGHFLIEGDLNPDNSDVDKLFIQLVQTYNQLFEENPINASGVDAKAILSARLSKSRRLENLIAQLPGEKKNGLFGNLIALSLGLTPNFKSNFDLAEDAKLQLSKDTYDDDLDNLLAQIGDQYADLFLAAKNLSDAILLSDILRVNTEITKAPLSASMIKRYDEHHQDLTLLKALVRQQLPEKYKEIFFDQSKNGYAGYIDGGASQEEFYKFIKPILEKMDGTEELLVKLNREDLLRKQRTFDNGSIPHQIHLGELHAILRRQEDFYPFLKDNREKIEKILTFRIPYYVGPLARGNSRFAWMTRKSEETITPWNFEEVVDKGASAQSFIERMTNFDKNLPNEKVLPKHSLLYEYFTVYNELTKVKYVTEGMRKPAFLSGEQKKAIVDLLFKTNRKVTVKQLKEDYFKKIECFDSVEISGVEDRFNASLGTYHDLLKIIKDKDFLDNEENEDILEDIVLTLTLFEDREMIEERLKTYAHLFDDKVMKQLKRRRYTGWGRLSRKLINGIRDKQSGKTILDFLKSDGFANRNFMQLIHDDSLTFKEDIQKAQVSGQGDSLHEHIANLAGSPAIKKGILQTVKVVDELVKVMGRHKPENIVIEMARENQTTQKGQKNSRERMKRIEEGIKELGSQILKEHPVENTQLQNEKLYLYYLQNGRDMYVDQELDINRLSDYDVDHIVPQSFLKDDSIDNKVLTRSDKNRGKSDNVPSEEVVKKMKNYWRQLLNAKLITQRKFDNLTKAERGGLSELDKAGFIKRQLVETRQITKHVAQILDSRMNTKYDENDKLIREVKVITLKSKLVSDFRKDFQFYKVREINNYHHAHDAYLNAVVGTALIKKYPKLESEFVYGDYKVYDVRKMIAKSEQEIGKATAKYFFYSNIMNFFKTEITLANGEIRKRPLIETNGETGEIVWDKGRDFATVRKVLSMPQVNIVKKTEVQTGGFSKESILPKRNSDKLIARKKDWDPKKYGGFVSPTVAYSVLVVAKVEKGKSKKLKSVKELLGITIMERSSFEKNPIDFLEAKGYKEVKKDLIIKLPKYSLFELENGRKRMLASARELQKGNELALPSKYVNFLYLASHYEKLKGSPEDNEQKQLFVEQHKHYLDEIIEQISEFSKRVILADANLDKVLSAYNKHRDKPIREQAENIIHLFTLTNLGAPAAFKYFDTTIDRKQYRSTKEVLDATLIHQSITGLYETRIDLSQLGGDEGADKRTADGSEFESPKKKRKV

SEQ ID NO: 355 - protein, 4 aa, synthetic construct
  REGION 1..4: note = synthetic peptide sequence
SGGS

SEQ ID NO: 356 - protein, 24 aa, synthetic construct
  REGION 1..24: note = synthetic peptide sequence
SGGSSGSETPGTSESATPESSGGS

SEQ ID NO: 357 - protein, 32 aa, synthetic construct
  REGION 1..32: note = synthetic polypeptide sequence
SGGSSGGSSGSETPGTSESATPESSGGSSGGS

SEQ ID NO: 358 - protein, 104 aa, synthetic construct
  REGION 1..104: note = synthetic polypeptide sequence
GGSGGSPGSPAGSPTSTEEGTSESATPESGPGTSTEPSEGSAPGSPAGSPTSTEEGTSTEPSEGSAPGTSTEPSEGSAPGTSESATPESGPGSEPATSGGSGGS

SEQ ID NO: 359 - protein, 24 aa, synthetic construct
  REGION 1..24: note = synthetic peptide sequence
SGGSSGGSSGSETPGTSESATPES

SEQ ID NO: 360 - protein, 40 aa, synthetic construct
  REGION 1..40: note = synthetic polypeptide sequence
SGGSSGGSSGSETPGTSESATPESSGGSSGGSSGGSSGGS

SEQ ID NO: 361 - protein, 64 aa, synthetic construct
  REGION 1..64: note = synthetic polypeptide sequence
SGGSSGGSSGSETPGTSESATPESSGGSSGGSSGGSSGGSSGSETPGTSESATPESSGGSSGGS

SEQ ID NO: 362 - protein, 92 aa, synthetic construct
  REGION 1..92: note = synthetic polypeptide sequence
PGSPAGSPTSTEEGTSESATPESGPGTSTEPSEGSAPGSPAGSPTSTEEGTSTEPSEGSAPGTSTEPSEGSAPGTSESATPESGPGSEPATS

SEQ ID NO: 363 - protein, 5 aa, synthetic construct
  REGION 1..5: note = synthetic peptide sequence
PAPAP

SEQ ID NO: 364 - protein, 6 aa, synthetic construct
  REGION 1..6: note = synthetic peptide sequence
PAPAPA

SEQ ID NO: 365 - protein, 7 aa, synthetic construct
  REGION 1..7: note = synthetic peptide sequence
PAPAPAP

SEQ ID NO: 366 - protein, 8 aa, synthetic construct
  REGION 1..8: note = synthetic peptide sequence
PAPAPAPA

SEQ ID NO: 367 - protein, 9 aa, synthetic construct
  REGION 1..9: note = synthetic peptide sequence
PAPAPAPAP

SEQ ID NO: 368 - protein, 15 aa, synthetic construct
  REGION 1..15: note = synthetic peptide sequence
PAPAPAPAPAPAPAP

SEQ ID NO: 369 - protein, 21 aa, synthetic construct
  REGION 1..21: note = synthetic peptide sequence
PAPAPAPAPAPAPAPAPAPAP

SEQ ID NO: 370 - DNA, 306 bp, synthetic construct
  misc_feature 1..306: note = DnaE Intein-N polynucleotide sequence
  source 1..306: mol_type = other DNA
tgcctgtcatacgaaaccgagatactgacagtagaatatggccttctgccaatcgggaagattgtggagaaacggatagaatgcacagtttactctgtcgataacaatggtaacatttatactcagccagttgcccagtggcacgaccggggagagcaggaagtattcgaatactgtctggaggatggaagtctcattagggccactaaggaccacaaatttatgacagtcgatggccagatgctgcctatagacgaaatctttgagcgagagttggacctcatgcgagttgacaaccttcctaat

SEQ ID NO: 371 - protein, 102 aa, synthetic construct
  REGION 1..102: note = DnaE Intein-N polypeptide sequence
CLSYETEILTVEYGLLPIGKIVEKRIECTVYSVDNNGNIYTQPVAQWHDRGEQEVFEYCLEDGSLIRATKDHKFMTVDGQMLPIDEIFERELDLMRVDNLPN

SEQ ID NO: 372 - DNA, 108 bp, synthetic construct
  misc_feature 1..108: note = DnaE Intein-C polynucleotide sequence
  source 1..108: mol_type = other DNA
atgatcaagatagctacaaggaagtatcttggcaaacaaaacgtttatgatattggagtcgaaagagatcacaactttgctctgaagaacggattcatagcttctaat

SEQ ID NO: 373 - protein, 36 aa, synthetic construct
  REGION 1..36: note = DnaE Intein-C polypeptide sequence
MIKIATRKYLGKQNVYDIGVERDHNFALKNGFIASN

SEQ ID NO: 374 - DNA, 303 bp, synthetic construct
  misc_feature 1..303: note = Cfa-N polynucleotide sequence
  source 1..303: mol_type = other DNA
tgcctgtcttatgataccgagatacttaccgttgaatatggcttcttgcctattggaaagattgtcgaagagagaattgaatgcacagtatatactgtagacaagaatggtttcgtttacacacagcccattgctcaatggcacaatcgcggcgaacaagaagtatttgagtactgtctcgaggatggaagcatcatacgagcaactaaagatcataaattcatgaccactgacgggcagatgttgccaatagatgagatattcgagcggggcttggatctcaaacaagtggatggattgcca

SEQ ID NO: 375 - protein, 101 aa, synthetic construct
  REGION 1..101: note = Cfa-N polypeptide sequence
CLSYDTEILTVEYGFLPIGKIVEERIECTVYTVDKNGFVYTQPIAQWHNRGEQEVFEYCLEDGSIIRATKDHKFMTTDGQMLPIDEIFERGLDLKQVDGLP

SEQ ID NO: 376 - DNA, 159 bp, synthetic construct
  misc_feature 1..159: note = Cfa-C polynucleotide sequence
  source 1..159: mol_type = other DNA
atgaagaggactgccgatggatcagagtttgaatctcccaagaagaagaggaaagtaaagataatatctcgaaaaagtcttggtacccaaaatgtctatgatattggagtggagaaagatcacaacttccttctcaagaacggtctcgtagccagcaac

SEQ ID NO: 377 - protein, 53 aa, synthetic construct
  REGION 1..53: note = Cfa-C polypeptide sequence
MKRTADGSEFESPKKKRKVKIISRKSLGTQNVYDIGVEKDHNFLLKNGLVASN

SEQ ID NO: 378 - protein, 1081 aa, Neisseria meningitidis
  REGION 1..1081: note = MISC_FEATURE - Nme3Cas9; WP_002217928.1 type II CRISPR RNA-guided endonuclease Cas9 [Neisseria meningitidis]
  REGION 1..1081: note = MISC_FEATURE - NCBI Reference: WP_002217928.1; type II CRISPR RNA-guided endonuclease Cas9; Nme3Cas9 polypeptide sequence
MAAFKPNPINYILGLDIGIASVGWAMVEIDEEENPIRLIDLGVRVFERAEVPKTGDSLAMARRLARSVRRLTRRRAHRLLRARRLLKREGVLQAADFDENGLIKSLPNTPWQLRAAALDRKLTPLEWSAVLLHLIKHRGYLSQRKNEGETADKELGALLKGVADNAHALQTGDFRTPAELALNKFEKECGHIRNQRGDYSHTFSRKDLQAELNLLFEKQKEFGNPHVSGGLKEGIETLLMTQRPALSGDAVQKMLGHCTFEPAEPKAAKNTYTAERFIWLTKLNNLRILEQGSERPLTDTERATLMDEPYRKSKLTYAQARKLLSLEDTAFFKGLRYGKDNAEASTLMEMKAYHTISRALEKEGLKDKKSPLNLSPELQDEIGTAFSLFKTDEDITGRLKDRIQPEILEALLKHISFDKFVQISLKALRRIVPLMEQGKRYDEACAEIYGDHYGKKNTEEKIYLPPIPADEIRNPVVLRALSQARKVINGVVRRYGSPARIHIETAREVGKSFKDRKEIEKRQEENRKDREKAAAKFREYFPNFVGEPKSKDILKLRLYEQQHGKCLYSGKEINLGRLNEKGYVEIDHALPFSRTWDDSFNNKVLVLGSENQNKGNQTPYEYFNGKDNSREWQEFKARVETSRFPRSKKQRILLQKFDEDGFKERNLNDTRYVNRFLCQFVADRMRLTGKGKKRVFASNGQITNLLRGFWGLRKVRAENDRHHALDAVVVACSTVAMQQKITRFVRYKEMNAFDGKTIDKETGEVLHQKTHFPQPWEFFAQEVMIRVFGKPDGKPEFEEADTPEKLRTLLAEKLSSRPEAVHEYVTPLFVSRAPNRKMSGQGHMETVKSAKRLDEGVSVLRVPLTQLKLKDLEKMVNREREPKLYEALKARLEAHKDDPAKAFAEPFYKYDKAGNRTQQVKAVRVEQVQKTGVWVRNHNGIADNATMVRVDVFEKGDKYYLVPIYSWQVAKGILPDRAVVAYADEEDWTVIDESFRFKFVLYSNDLIKVQLKKDSFLGYFSGLDRATGAISLREHDLEKSKGKDGMHRIGVKTALSFQKYQIDEMGKEIRPCRLKKRPPVR

SEQ ID NO: 379 - RNA, 66 nt, synthetic construct
  misc_feature 1..66: note = Telomerase Ku Binding Motif oligonucleotide sequence
  source 1..66: mol_type = other RNA
ttcttgtcgtacttatagatcgctacgttatttcaattttgaaaatctgagtcctgggagtgcgga

SEQ ID NO: 380 - protein, 1094 aa, synthetic construct
  REGION 1..1094: note = Telomerase Ku Heterodimer polypeptide sequence
MSGWESYYKTEGDEEAEEEQEENLEASGDYKYSGRDSLIFLVDASKAMFESQSEDELTPFDMSIQCIQSVYISKIISSDRDLLAVVFYGTEKDKNSVNFKNIYVLQELDNPGAKRILELDQFKGQQGQKRFQDMMGHGSDYSLSEVLWVCANLFSDVQFKMSHKRIMLFTNEDNPHGNDSAKASRARTKAGDLRDTGIFLDLMHLKKPGGFDISLFYRDIISIAEDEDLRVHFEESSKLEDLLRKVRAKETRKRALSRLKLKLNKDIVISVGIYNLVQKALKPPPIKLYRETNEPVKTKTRTFNTSTGGLLLPSDTKRSQIYGSRQIILEKEETEELKRFDDPGLMLMGFKPLVLLKKHHYLRPSLFVYPEESLVIGSSTLFSALLIKCLEKEVAALCRYTPRRNIPPYFVALVPQEEELDDQKIQVTPPGFQLVFLPFADDKRKMPFTEKIMATPEQVGKMKAIVEKLRFTYRSDSFENPVLQQHFRNLEALALDLMEPEQAVDLTLPKVEAMNKRLGSLVDEFKELVYPPDYNPEGKVTKRKHDNEGSGSKRPKVEYSEEELKTHISKGTLGKFTVPMLKEACRAYGLKSGLKKQELLEALTKHFQDMVRSGNKAAVVLCMDVGFTMSNSIPGIESPFEQAKKVITMFVQRQVFAENKDEIALVLFGTDGTDNPLSGGDQYQNITVHRHLMLPDFDLLEDIESKIQPGSQQADFLDALIVSMDVIQHETIGKKFEKRHIEIFTDLSSRFSKSQLDIIIHSLKKCDISERHSIHWPCRLTIGSNLSIRIAAYKSILQERVKKTWTVVDAKTLKKEDIQKETVYCLNDDDETEVLKEDIIQGFRYGSDIVPFSKVDEEQMKYKSEGKCFSVLGFCKSSQVQRRFFMGNQVLKVFAARDDEAAAVALSSLIHALDDLDMVAIVRYAYDKRANPQVGVAFPHIKHNYECLVYVQLPFMEDLRQYMFSSLKNSKKYAPTEAQLNAVDALIDSMSLAKKDEKTDTLEDLFPTTKIPNPRFQRLFQCLLHRALHPREPLPPIQQHIWNMLNPPAEVTTKSQIPLSKIKTLFPLIEAKKKDQVTAQEIFQDNHEDGPTAK

SEQ ID NO: 381 - RNA, 10 nt, synthetic construct
  misc_feature 1..10: note = Telomerase Sm7 consensus site(single stranded) oligonucleotide sequence
  source 1..10: mol_type = other RNA
aatttttgga

SEQ ID NO: 382 - protein, 83 aa, synthetic construct
  REGION 1..83: note = MS2 coat protein polypeptide sequence
GSVIDVSSQRVNVQRPLDALGNSLNSPVIIKLKGDREFRGVLKSFDLHMNLVLNDAEELEDGEVTRRLGTVLIRGDNIVYISP

SEQ ID NO: 383 - RNA, 26 nt, synthetic construct
  misc_feature 1..26: note = PP7 phage operator stem loop oligonucleotide sequence
  source 1..26: mol_type = other RNA
ataaggagtttatatggaaaccctta

SEQ ID NO: 384 - protein, 128 aa, synthetic construct
  REGION 1..128: note = PP7 coat protein (PCP)polypeptide sequence
MSKTIVLSVGEATRTLTEIQSTADRQIFEEKVGPLVGRLRLTASLRQNGAKTAYRVNLKLDQADVVDCSTSVCGELPKVRYTQVWSHDVTIVANSTEASRKSLYDLTKSLVATSQVEDLVVNLVPLGR

SEQ ID NO: 385 - RNA, 19 nt, synthetic construct
  misc_feature 1..19: note = SfMu Com stem loop oligonucleotide sequence
  source 1..19: mol_type = other RNA
ctgaatgcctgcgagcatc

SEQ ID NO: 386 - protein, 62 aa, synthetic construct
  REGION 1..62: note = SfMu Com binding protein polypeptide sequence
MKSIRCKNCNKLLFKADSFDHIEIRCPRCKRHIIMLNACEHPTEKHCGKREKITHSDETVRY

SEQ ID NO: 387 - protein, 47 aa, synthetic construct
  REGION 1..47: note = leucine zipper polypeptide sequence
LEIRAAFLRQRNTALRTEVAELEQEVQRLENEVSQYETRYGPLGGGK

SEQ ID NO: 388 - protein, 47 aa, synthetic construct
  REGION 1..47: note = leucine zipper polypeptide sequence
LEIEAAFLERENTALETRVAELRQRVQRLRNRVSQYRTRYGPLGGGK

SEQ ID NO: 389 - DNA, 303 bp, synthetic construct
  source 1..303: mol_type = other DNA
tgcctgagctacgataccgagatcctgaccgtggaatacggcttcctgcctatcggcaagatcgtcgaggaacggatcgagtgcacagtgtacaccgtggataagaatggcttcgtgtacacccagcctatcgctcagtggcacaacagaggcgagcaagaggtgttcgagtactgcctggaagatggcagcatcatccgggccaccaaggaccacaagtttatgaccaccgacggccagatgctgcccatcgacgagatctttgagagaggcctggacctgaaacaggtggacggactgcct

SEQ ID NO: 390 - protein, 101 aa, synthetic construct; identical to SEQ ID NO: 375

SEQ ID NO: 391 - DNA, 264 bp, synthetic construct
  source 1..264: mol_type = other DNA
tgtctggacctcaagacccaagtgcagacacctcagggcatgaaagagattagcaatatccaggtgggcgacctggtcctgagcaacaccggctacaacgaggtgctgaacgtgttccctaagtccaagaagaaatcttataagatcaccctggaagatggcaaggaaatcatctgcagcgaggaacacctgttccccacccagaccggcgagatgaacatcagcggcggactgaaggagggcatgtgcctgtacgtgaaggag

SEQ ID NO: 392 - protein, 88 aa, synthetic construct
CLDLKTQVQTPQGMKEISNIQVGDLVLSNTGYNEVLNVFPKSKKKSYKITLEDGKEIICSEEHLFPTQTGEMNISGGLKEGMCLYVKE

SEQ ID NO: 393 - DNA, 267 bp, synthetic construct
  source 1..267: mol_type = other DNA
tgcctgagcctggacaccatggtggtgacaaacggcaaggccatcgagatcagagatgtgaaggtgggagattggctggaaagcgaatgtggcccagtgcaggttacagaggtgctgcctatcatcaagcagcctgtctttgagattgtgctgaaaagcggaaaaaagatccgggtgtccgctaatcacaagttccccaccaaggacggcctcaagaccatcaacagcggcctgaaggtgggcgacttcctgagaagcagagccaag

SEQ ID NO: 394 - protein, 89 aa, synthetic construct
CLSLDTMVVTNGKAIEIRDVKVGDWLESECGPVQVTEVLPIIKQPVFEIVLKSGKKIRVSANHKFPTKDGLKTINSGLKVGDFLRSRAK

SEQ ID NO: 395 - DNA, 303 bp, synthetic construct
  source 1..303: mol_type = other DNA
tgttttgtgcctggcaccctggtgaacacagagaatggcctgaagaaaatcgaggaaatcaaggtgggcgacaaggtgttcagccatacaggcaagctgcaggaggtggtggacaccctgatcttcgaccgggacgaggaaatcatctctatcaacggcattgattgcaccaagaaccacgagttctacgtgatcgataaggaaaacgctaatagagtgaacgaggacaacatccacctcttcgccagatgggtccacgccgaggaactggatatgaaaaagcacctgctgatcgagctggaa

SEQ ID NO: 396 - protein, 101 aa, synthetic construct
CFVPGTLVNTENGLKKIEEIKVGDKVFSHTGKLQEVVDTLIFDRDEEIISINGIDCTKNHEFYVIDKENANRVNEDNIHLFARWVHAEELDMKKHLLIELE

SEQ ID NO: 397 - DNA, 315 bp, synthetic construct
  source 1..315: mol_type = other DNA
tgcctggtgggctctagcgagattatcacaagaaactacggcaagaccaccatcaaggaagtggtcgagatcttcgacaacgacaagaatatccaggtgctggccttcaacacccacaccgataatatcgagtgggcccctatcaaggccgctcagctgaccagacctaacgccgagctggttgaactggaaatcgacaccctgcacggcgtgaaaacaatccggtgcacccctgaccaccccgtgtacaccaagaacagaggctacgtgcgggccgacgagctgacagatgatgacgagctcgtggtggctatc

SEQ ID NO: 398 - protein, 105 aa, synthetic construct
CLVGSSEIITRNYGKTTIKEVVEIFDNDKNIQVLAFNTHTDNIEWAPIKAAQLTRPNAELVELEIDTLHGVKTIRCTPDHPVYTKNRGYVRADELTDDDELVVAI

SEQ ID NO: 399 - DNA, 306 bp, synthetic construct
  source 1..306: mol_type = other DNA
tgcctgagctacgagacagagatcctgaccgtggaatatggcctgctgccaatcggaaagatcgtggaaaagcggatcgagtgcaccgtctacagcgtggacaacaacggaaatatctatacacagcctgtggcccaatggcacgaccggggcgaacaggaggtgtttgagtactgcctggaagatggttctctgattagagccaccaaggaccacaagttcatgaccgtcgacggccagatgctgcccatcgacgaaatcttcgagcgggaactcgacctgatgagagtggataacctgcccaat

SEQ ID NO: 400 - protein, 102 aa, synthetic construct; identical to SEQ ID NO: 371

SEQ ID NO: 401 - protein, 101 aa, synthetic construct; identical to SEQ ID NO: 375

SEQ ID NO: 402 - protein, 102 aa, synthetic construct; identical to SEQ ID NO: 371

SEQ ID NO: 403 - DNA, 279 bp, synthetic construct
  source 1..279: mol_type = other DNA
acaagaagcggatactgtctggacctcaagacccaagtgcagacacctcagggcatgaaagagattagcaatatccaggtgggcgacctggtcctgagcaacaccggctacaacgaggtgctgaacgtgttccctaagtccaagaagaaatcttataagatcaccctggaagatggcaaggaaatcatctgcagcgaggaacacctgttccccacccagaccggcgagatgaacatcagcggcggactgaaggagggcatgtgcctgtacgtgaaggag

SEQ ID NO: 404 - protein, 93 aa, synthetic construct
TRSGYCLDLKTQVQTPQGMKEISNIQVGDLVLSNTGYNEVLNVFPKSKKKSYKITLEDGKEIICSEEHLFPTQTGEMNISGGLKEGMCLYVKE

SEQ ID NO: 405 - DNA, 282 bp, synthetic construct
  source 1..282: mol_type = other DNA
tctcagctgaaccggtgcctgagcctggacaccatggtggtgacaaacggcaaggccatcgagatcagagatgtgaaggtgggagattggctggaaagcgaatgtggcccagtgcaggttacagaggtgctgcctatcatcaagcagcctgtctttgagattgtgctgaaaagcggaaaaaagatccgggtgtccgctaatcacaagttccccaccaaggacggcctcaagaccatcaacagcggcctgaaggtgggcgacttcctgagaagcagagccaag

SEQ ID NO: 406 - protein, 94 aa, synthetic construct
SQLNRCLSLDTMVVTNGKAIEIRDVKVGDWLESECGPVQVTEVLPIIKQPVFEIVLKSGKKIRVSANHKFPTKDGLKTINSGLKVGDFLRSRAK

SEQ ID NO: 407 - DNA, 318 bp, synthetic construct
  source 1..318: mol_type = other DNA
ggcatcggcggaggatgttttgtgcctggcaccctggtgaacacagagaatggcctgaagaaaatcgaggaaatcaaggtgggcgacaaggtgttcagccatacaggcaagctgcaggaggtggtggacaccctgatcttcgaccgggacgaggaaatcatctctatcaacggcattgattgcaccaagaaccacgagttctacgtgatcgataaggaaaacgctaatagagtgaacgaggacaacatccacctcttcgccagatgggtccacgccgaggaactggatatgaaaaagcacctgctgatcgagctggaa

SEQ ID NO: 408 - protein, 106 aa, synthetic construct
GIGGGCFVPGTLVNTENGLKKIEEIKVGDKVFSHTGKLQEVVDTLIFDRDEEIISINGIDCTKNHEFYVIDKENANRVNEDNIHLFARWVHAEELDMKKHLLIELE

SEQ ID NO: 409 - DNA, 330 bp, synthetic construct
  source 1..330: mol_type = other DNA
ggaacaaacccatgttgcctggtgggctctagcgagattatcacaagaaactacggcaagaccaccatcaaggaagtggtcgagatcttcgacaacgacaagaatatccaggtgctggccttcaacacccacaccgataatatcgagtgggcccctatcaaggccgctcagctgaccagacctaacgccgagctggttgaactggaaatcgacaccctgcacggcgtgaaaacaatccggtgcacccctgaccaccccgtgtacaccaagaacagaggctacgtgcgggccgacgagctgacagatgatgacgagctcgtggtggctatc

SEQ ID NO: 410 - protein, 110 aa, synthetic construct
GTNPCCLVGSSEIITRNYGKTTIKEVVEIFDNDKNIQVLAFNTHTDNIEWAPIKAAQLTRPNAELVELEIDTLHGVKTIRCTPDHPVYTKNRGYVRADELTDDDELVVAI

SEQ ID NO: 411 - DNA, 105 bp, synthetic construct
  source 1..105: mol_type = other DNA
gtcaagatcatcagcagaaagagcctgggcacccagaacgtgtacgatatcggagtgggcgagccccacaactttctgctcaagaatggcctggtggccagcaac

SEQ ID NO: 412 - protein, 35 aa, synthetic construct
VKIISRKSLGTQNVYDIGVGEPHNFLLKNGLVASN

SEQ ID NO: 413 - DNA, 114 bp, synthetic construct
  source 1..114: mol_type = other DNA
atgatgctgaaaaagatcctgaagatcgaggaactggatgagagagagctgatcgacatcgaagtgtctggcaatcacctgttctacgccaacgacatcctgacccacaacagc

SEQ ID NO: 414 - protein, 38 aa, synthetic construct
MMLKKILKIEELDERELIDIEVSGNHLFYANDILTHNS

SEQ ID NO: 415 - DNA, 138 bp, synthetic construct
  source 1..138: mol_type = other DNA
atgtgcgaaatcttcgagaacgagattgattgggacgaaatcgcctctatcgagtacgtgggcgtggaagagacaatcgacatcaacgtgaccaacgacagactgtttttcgccaatggcatcctgacccacaacagc

SEQ ID NO: 416 - protein, 46 aa, synthetic construct
MCEIFENEIDWDEIASIEYVGVEETIDINVTNDRLFFANGILTHNS

SEQ ID NO: 417 - DNA, 123 bp, synthetic construct
  source 1..123: mol_type = other DNA
atgaaattcaagctgaaggaaatcaccagcatcgagacaaagcactacaagggcaaggtgcacgatctgaccgtgaaccaggaccacagctacaacgtcagaggcaccgtggtgcataattct

SEQ ID NO: 418 - protein, 41 aa, synthetic construct
MKFKLKEITSIETKHYKGKVHDLTVNQDHSYNVRGTVVHNS

SEQ ID NO: 419 - DNA, 123 bp, synthetic construct
  source 1..123: mol_type = other DNA
atggaagccaagacctacatcggcaagctgaaatctagaaagatcgtgtccaacgaggatacatacgacatccagaccagcacccacaatttcttcgccaacgacatcctggtgcacaacagc

SEQ ID NO: 420 - protein, 41 aa, synthetic construct
MEAKTYIGKLKSRKIVSNEDTYDIQTSTHNFFANDILVHNS

SEQ ID NO: 421 - DNA, 108 bp, synthetic construct
  source 1..108: mol_type = other DNA
atgatcaagatcgccacaagaaagtacctgggcaagcagaacgtgtacgacatcggcgtggagagagaccacaacttcgccctgaagaacggctttatcgcctctaat

SEQ ID NO: 422 - protein, 36 aa, synthetic construct; identical to SEQ ID NO: 373

SEQ ID NO: 423 - protein, 36 aa, synthetic construct
MVKIISRKSLGTQNVYDIGVGEPHNFLLKNGLVASN

SEQ ID NO: 424 - protein, 35 aa, synthetic construct
IKIATRKYLGKQNVYDIGVERDHNFALKNGFIASN

SEQ ID NO: 425 - DNA, 88 bp, synthetic construct
  source 1..88: mol_type = other DNA; note = SaCas9 scaffold sequence
gttttagtactctgtaatgaaaattacagaatctactaaaacaaggcaaaatgccgtgtttatctcgtcaacttgttggcgagatttt

SEQ ID NO: 426 - protein, 166 aa, synthetic construct
SEVEFSHEYWMRHALTLAKRARDEREVPVGAVLVHNNRVIGEGWNRAIGLHDPTAHAEIMALRQGGLVMQNYRLYDATLYTTFEPCVMCAGAMIHSRIGRVVFGVRNAKTGAAGSLMDVLHYPGMNHRVEITEGILADECAALLCTFFRMPRSVFKAQKKAQSSTD

SEQ ID NO: 427 - protein, 418 aa, Homo sapiens
MPSSVSWGILLLAGLCCLVPVSLAEDPQGDAAQKTDTSHHDQDHPTFNKITPNLAEFAFSLYRQLAHQSNSTNIFFSPVSIATAFAMLSLGTKADTHDEILEGLNFNLTEIPEAQIHEGFQELLRTLNQPDSQLQLTTGNGLFLSEGLKLVDKFLEDVKKLYHSEAFTVNFGDTEEAKKQINDYVEKGTQGKIVDLVKELDRDTVFALVNYIFFKGKWERPFEVKDTEEEDFHVDQVTTVKVPMMKRLGMFNIQHCKKLSSWVLLMKYLGNATAIFFLPDEGKLQHLENELTHDIITKFLENEDRRSASLHLPKLSITGTYDLKSVLGQLGITKVFSNGADLSGVTEEAPLKLSKAVHKAVLTIDEKGTEAAGAMFLEAIPMSIPPEVKFNKPFVFLMIEQNTKSPLFMGKVVNPTQK

SEQ ID NO: 428 - DNA, 1257 bp, Homo sapiens
  source 1..1257: mol_type = other DNA
atgccgtcttctgtctcgtggggcatcctcctgctggcaggcctgtgctgcctggtccctgtctccctggctgaggatccccagggagatgctgcccagaagacagatacatcccaccatgatcaggatcacccaaccttcaacaagatcacccccaacctggctgagttcgccttcagcctataccgccagctggcacaccagtccaacagcaccaatatcttcttctccccagtgagcatcgctacagcctttgcaatgctctccctggggaccaaggctgacactcacgatgaaatcctggagggcctgaatttcaacctcacggagattccggaggctcagatccatgaaggcttccaggaactcctccgtaccctcaaccagccagacagccagctccagctgaccaccggcaatggcctgttcctcagcgagggcctgaagctagtggataagtttttggaggatgttaaaaagttgtaccactcagaagccttcactgtcaacttcggggacaccgaagaggccaagaaacagatcaacgattacgtggagaagggtactcaagggaaaattgtggatttggtcaaggagcttgacagagacacagtttttgctctggtgaattacatcttctttaaaggcaaatgggagagaccctttgaagtcaaggacaccgaggaagaggacttccacgtggaccaggtgaccaccgtgaaggtgcctatgatgaagcgtttaggcatgtttaacatccagcactgtaagaagctgtccagctgggtgctgctgatgaaatacctgggcaatgccaccgccatcttcttcctgcctgatgaggggaaactacagcacctggaaaatgaactcacccacgatatcatcaccaagttcctggaaaatgaagacagaaggtctgccagcttacatttacccaaactgtccattactggaacctatgatctgaagagcgtcctgggtcaactgggcatcactaaggtcttcagcaatggggctgacctctccggggtcacagaggaggcacccctgaagctctccaaggccgtgcataaggctgtgctgaccatcgacgagaaagggactgaagctgctggggccatgtttttagaggccatacccatgtctatcccccccgaggtcaagttcaacaaaccctttgtcttcttaatgattgaacaaaataccaagtctcccctcttcatgggaaaagtggtgaatcccacccaaaaataa

SEQ ID NO: 429 - DNA, 15147 bp, Homo sapiens
  source 1..15147: mol_type = other DNA
tggtgcgtttttccagattatcctagcccttcctcccaggatggatgtccagagcagggcgggggctgagcctagagccctgccaaaagagcaggaccccaaattctgagccccttacttgcctcacctgctcccacccatgctttcttcattcctcctccaaaagccccagctccccactgcaatcccttctgcacccagccaggtcctatgacacacacctccccagtgcacacagacctgcccaactgtggggctgcccactgggcatttcataggtggctcagtcctcttccctctgcagctggccccagaaacctgccagttattggtgccaggtctgtgccaggagggcgaggcctgtcatttctagtaatcctctgggcagtgtgactgtacctcttgcggcaactcaaagggagagggtgacttgtcccgggtcacagagctgaaagggcaggtacaacaggtgacatgccgggctgtctgagtttatgagggcccagtcttgtgtctgccgggcaatgagcaaggctccttcctgtccaagctccccgcccctccccagcctactgcctccacccgaagtctacttcctgggtgggcaggaactgggcactgtgcccagggcatgcactgcctccacgcagcaaccctcagagtcctgagctgaaccaagaaggaggagggggtcgggcctccgaggaaggcctagccgctgctgctgccaggaattccaggttggaggggcggcaacctcctgccagccttcaggccactctcctgtgcctgccagaagagacagagcttgaggagagcttgaggagagcaggaaaggtgggacattgctgctgctgctcactcagttccacaggtgggagggacagcagggcttagagtgggggtcattgtgcagatgggaaaacaaaggcccagagaggggaagaaatgcccaggagctaccgagggcaggcgacctcaaccacagcccagtgctggagctgtgagtggatgtagagcagcggaatatccattcagccagctcaggggaaggacaggggccctgaagccaggggatggagctgcagggaagggagctcagagagaaggggaggggagtctgagctcagtttcccgctgcctgaaaggagggtggtacctactcccttcacagggtaactgaatgagagactgcctggaggaaagctcttcaagtgtggcccaccccaccccagtgacaccagcccctgacacgggggagggagggcagcatcaggaggggctttctgggcacacccagtacccgtctctgagctttccttgaactgttgcattttaatcctcacagcagctcaacaaggtacataccgtcaccatccccattttacagatagggaaattgaggctcggagcggttaaacaactcacctgaggcctcacagccagtaagtgggttccctggtctgaatgtgtgtgctggaggatcctgtgggtcactcgcctggtagagccccaaggtggaggcataaatgggactggtgaatgacagaaggggcaaaaatgcactcatccattcactctgcaagtatctacggcacgtacgccagctcccaagcaggtttgcgggttgcacagcgggcgatgcaatctgatttaggcttttaaagggattgcaatcaagtggggccccactagcctcaaccctgtacctcccctcccctccacccccagcagtctccaaaggcctccaacaaccccagagtgggggccatgtatccaaagaaactccaagctgtatacggatcacactggttttccaggagcaaaaacagaaacaggcctgaggctggtcaaaattgaacctcctcctgctctgagcagcctggggggcagactaagcagagggctgtgcagacccacataaagagcctactgtgtgccaggcacttcacccgaggcacttcacaagcatgcttgggaatgaaacttccaactctttgggatgcaggtgaaacagttcctggttcagagaggtgaagcggcctgcctgaggcagcacagctcttctttacagatgtgcttccccacctctaccctgtctcacggccccccatgccagcctgacggttgtgtctgcctcagtcatgctccatttttccatcgggaccatcaagagggtgtttgtgtctaaggctgactgggtaactttggatgagcggtctctccgctctgagcctgtttcctcatctgtcaaatgggctctaacccactctgatctcccagggcggcagtaagtcttcagcatcaggcattttggggtgactcagtaaatggtagatcttgctaccagtggaacagccactaaggattctgcagtgagagcagagggccagctaagtggtactctcccagagactgtctgactcacgccaccccctccaccttggacacaggacgctgtggtttctgagccaggtacaatgactcctttcggtaagtgcagtggaagctgtacactgcccaggcaaagcgtccgggcagcgtaggcgggcgactcagatcccagccagtggacttagcccctgtttgctcctccgataactggggtgaccttggttaatattcaccagcagcctcccccgttgcccctctggatccactgcttaaatacggacgaggacagggccctgtctcctcagcttcaggcaccaccactgacctgggacagtgaatcgtaagtatgcctttcactgcgagaggttctggagaggcttctgagctccccatggcccaggcaggcagcaggtctggggcaggaggggggttgtggagtgggtatccgcctgctgaggtgcagggcagatggagaggctgcagctgagctcctattttcataataacagcagccatgagggttgtgtcctgtttcccagtcctgcccggtcccccctcggtacctcctggtggatacactggttcctgtaagcagaagtggatgagggtgtctaggtctgcagtcctggcaccccaggatgggggacaccagccaagatacagcaacagcaacaaagcgcagccatttctttctgtttgcacagctcctctgtctgtcgggggctcctgtctgttgtctcctataagcctcaccacctctcctactgcttgggcatgcatctttctccccttctatagatgaggaggttaaggtccagagaggggtggggaggaacgccggctcacattctccatcccctccagatatgaccaggaacagacctgtgccaggcctcagccttacatcaaaatgggcctccccatgcaccgtggacctctgggccctcctgtcccagtggaggacaggaagctgtgaggggcactgtcacccagggctcaagctggcattcctgaataatcgctctgcaccaggccacggctaagctcagtgcgtgattaagcctcataaccctccaaggcagttactagtgtgattcccattttacagatgaggaagatggggacagagaggtgaataactggccccaaatcacacaccatccataattcgggctcaggcacctggctccagtccccaaactcttgaacctggccctagtgtcactgtttctcttgggtctcaggcgctggatggggaacaggaaacctgggctggacttgaggcctctctgatgctcggtgacttcagacagttgctcaacctctctgttctcttgggcaaaacatgataacctttgacttctgtcccctcccctcaccccacccgaccttgatctctgaagtgttggaaggatttaatttttcctgcactgagttttggagacaggtcaaaaagatgaccaaggccaaggtggccagtttcctatagaacgcctctaaaagacctgcagcaatagcagcaagaactggtattctcgagaacttgctgcgcagcaggcacttcttggcattttatgtgtatttaatttcacaatagctctatgacaaagtccacctttctcatctccaggaaactgaggttcagagaggttaagtaacttgtccaaggtcacacagctaatagcaagttgacgtggagcaatctggcctcagagcctttaattttagccacagactgatgctcccctcttcatttagccaggctgcctctgaagttttctgattcaagacttctggcttcagctttgtacacagagatgattcaatgtcaggttttggagtgaaatctgtttaatcccagacaaaacatttaggattacatctcagttttgtaagcaagtagctctgtgatttttagtgagttatttaatgctctttggggctcaatttttctatctataaaatagggctaataatttgcaccttatagggtaagctttgaggacagattagatgatacggtgcctgtaaaacaccaggtgttagtaagtgtggcaatgatggtgacgctgaggctgatgtttgcttagcatagggttaggcagctggcaggcagtaaacagttggataatttaatggaaaatttgccaaactcagatgctgttcactgctgagcaggagccccttcctgctgaaatggtcctggggagtgcagcaggctctccgggaagaaatctaccatctctcgggcaggagctcaacctgtgtgcaggtacagggagggcttcctcacctggtgcccactcatgcattacgtcagttattcctcatccctgtccaaaggattcttttctccattgtacagctatgaagctagtgctcaaagaagtgaagtcatttaccccaggccccctgccagtaagtgacagggcctggtcacacttgggtttatttattgcccagttcaacaggttgtttgaccataggcgagattctcttccctgcaccctgccgggttgctcttggtcccttattttatgctcccgggtagaaatggtgtgagattaggcagggagtggctcgcttccctgtccctggccccgcaaagagtgctcccacctgccccgatcccagaaatgtcaccatgaagccttcattcttttggtttaaagcttggcctcagtgtccgtacaccatggggtacttggccagatggcgactttctcctctccagtcgccctcccaggcactagcttttaggagtgcagggtgctgcctctgatagaagggccaggagagagcaggttttggagtcctgatgttataaggaacagcttgggaggcataatgaacccaacatgatgcttgagaccaatgtcacagcccaattctgacattcatcatctgagatctgaggacacagctgtctcagttcatgatctgagtgctgggaaagccaagacttgttccagctttgtcactgacttgctgtatagcctcaacaaggccctgaccctctctgggcttcaaactcttcactgtgaaaggaggaaaccagagtaggtgatgtgacaccaggaaagatggatgggtgtgggggaatgtgctcctcccagctgtcaccccctcgccaccctccctgcaccagcctctccacctcctttgagcccagaattcccctgtctaggagggcacctgtctcatgcctagccatgggaattctccatctgttttgctacattgaacccagatgccattctaaccaagaatcctggctgggtgcaggggctctcgcctgtaaccccagcactttgggaggccaaggcaggcggatcaagaggtcaggagttcaagacctgcctggccaacacggtgaaacctcagctctactaaaaatacaaaaattagccaggcgtggtggcacacgcctgtaatcccagctatttgggaagctgagacagaagaatttcttgaacccgggaggtggaggtttcagtgagccgagatcacgccactgcactccaccctggcagataaagcgagactctgtctcaaaaaaaacccaaaaacctatgttagtgtacagagggccccagtgaagtcttctcccagccccactttgcacaactggggagagtgaggccccaggaccagaggattcttgctaaaggccaagtggatagtgatggccctgccagggctagaagccacaacctctggccctgaggccactcagcatatttagtgtccccaccctgcagaggcccaactccctcctgaccactgagccctgtaatgatgggggaatttccataagccatgaaggactgcacaaagttcagttgggaagtgaaagagaaattaaagggagatggaaatatacagcactaattttagcaccgtctttagttctaacaacactagctagctgaagaaaaatacaaacatgtattatgtaatgtgtggtctgttccatttggattacttagaggcacgagggccaggagaaaggtggtggagagaaaccagctttgcacttcatttgttgctttattggaaggaaacttttaaaagtccaagggggttgaagaatctcaatatttgttatttccagctttttttctccagtttttcatttcccaaattcaaggacacctttttctttgtattttgttaagatgatggttttggttttgtgactagtagttaacaatgtggctgccgggcatattctcctcagctaggacctcagttttcccatctgtgaagacggcaggttctacctagggggctgcaggctggtggtccgaagcctgggcatatctggagtagaaggatcactgtggggcagggcaggttctgtgttgctgtggatgacgttgactttgaccattgctcggcagagcctgctctcgctggttcagccacaggccccaccactccctattgtctcagccccgggtatgaaacatgtattcctcactggcctatcacctgaagcctttgaatttgcaacacctgccaacccctccctcaaaagagttgccctctcagatccttttgatgtaaggtttggtgttgagacttatttcactaaattctcatacataaacatcactttatgtatgaggcaaaatgaggaccagggagatgaatgacttgtcctggctcatacacctggaaagtgacagagtcagattagatcccaggtctatctgaagttaaaagaggtgtcttttcacttcccacctcctccatctactttaaagcagcacaaacccctgctttcaaggagagatgagcgtctctaaagcccctgacagcaagagcccagaactgggacaccattagtgacccagacggcaggtaagctgactgcaggagcatcagcctattcttgtgtctgggaccacagagcattgtggggacagccccgtctcttgggaaaaaaaccctaagggctgaggatccttgtgagtgttgggtgggaacagctcccaggaggtttaatcacagcccctccatgctctctagctgttgccattgtgcaagatgcatttcccttctgtgcagcagtttccctggccactaaatagtgggattagatagaagccctccaagggcttccagcttgacatgattcttgattctgatctggcccgattcctggataatcgtgggcaggcccattcctcttcttgtgcctcattttcttcttttgtaaaacaatggctgtaccatttgcatcttagggtcattgcagatgtaagtgttgctgtccagagcctgggtgcaggacctagatgtaggattctggttctgctacttcctcagtgacattgaatagctgacctaatctctctggctttggtttcttcatctgtaaaagaaggatattagcattagcacctcacgggattgttacaagaaagcaatgaattaacacatgtgagcacggagaacagtgcttggcatatggtaagcactacgtacattttgctattcttctgattctttcagtgttactgatgtcggcaagtacttggcacaggctggtttaataatccctaggcacttccacgtggtgtcaatccctgatcactgggagtcatcatgtgccttgactcggggcctggcccccccatctctgtcttgcaggacaatgccgtcttctgtctcgtggggcatcctcctgctggcaggcctgtgctgcctggtccctgtctccctggctgaggatccccagggagatgctgcccagaagacagatacatcccaccatgatcaggatcacccaaccttcaacaagatcacccccaacctggctgagttcgccttcagcctataccgccagctggcacaccagtccaacagcaccaatatcttcttctccccagtgagcatcgctacagcctttgcaatgctctccctggggaccaaggctgacactcacgatgaaatcctggagggcctgaatttcaacctcacggagattccggaggctcagatccatgaaggcttccaggaactcctccgtaccctcaaccagccagacagccagctccagctgaccaccggcaatggcctgttcctcagcgagggcctgaagctagtggataagtttttggaggatgttaaaaagttgtaccactcagaagccttcactgtcaacttcggggacaccgaagaggccaagaaacagatcaacgattacgtggagaagggtactcaagggaaaattgtggatttggtcaaggagcttgacagagacacagtttttgctctggtgaattacatcttctttaaaggtaaggttgctcaaccagcctgagctgttcccatagaaacaagcaaaaatattctcaaaccatcagttcttgaactctccttggcaatgcattatgggccatagcaatgcttttcagcgtggattcttcagttttctacacacaaacactaaaatgttttccatcattgagtaatttgaggaaataatagattaaactgtcaaaactactgacagctctgcagaacttttcagagcctttaatgtccttgtgtatactgtatatgtagaatatataatgcttagaactatagaacaaattgtaatacactgcataaagggatagtttcatggaacatactttacacgactctagtgtcccagaatcagtatcagttttgcaatctgaaagacctgggttcaaatcctgcctctaacacaattagcttttgacaaaaacaatgcattctacctctttgaggtgctaatttctcatcttagcatggacaaaataccattcttgctgtcaggtttttttaggattaaacaaatgacaaagactgtggggatggtgtgtggcatacagcaggtgatggactcttctgtatctcaggctgccttcctgcccctgaggggttaaaatgccagggtcctgggggccccagggcattctaagccagctcccactgtcccaggaaaacagcataggggaggggaggtgggaggcaaggccaggggctgcttcctccactctgaggctcccttgctcttgaggcaaaggagggcagtggagagcagccaggctgcagtcagcacagctaaagtcctggctctgctgtggccttagtgggggcccaggtccctctccagccccagtctcctccttctgtccaatgagaaagctgggatcaggggtccctgaggcccctgtccactctgcatgcctcgatggtgaagctctgttggtatggcagaggggaggctgctcaggcatctgcatttcccctgccaatctagaggatgaggaaagctctcaggaatagtaagcagaatgtttgccctggatgaataactgagctgccaattaacaaggggcagggagccttagacagaaggtaccaaatatgcctgatgctccaacattttatttgtaatatccaagacaccctcaaataaacatatgattccaataaaaatgcacagccacgatggcatctcttagcctgacatcgccacgatgtagaaattctgcatcttcctctagttttgaattatccccacacaatctttttcggcagcttggatggtcagtttcagcaccttttacagatgatgaagctgagcctcgagggatgtgtgtcgtcaagggggctcagggcttctcagggaggggactcatggtttctttattctgctacactcttccaaaccttcactcacccctggtgatgcccaccttcccctctctccaggcaaatgggagagaccctttgaagtcaaggacaccgaggaagaggacttccacgtggaccaggtgaccaccgtgaaggtgcctatgatgaagcgtttaggcatgtttaacatccagcactgtaagaagctgtccagctgggtgctgctgatgaaatacctgggcaatgccaccgccatcttcttcctgcctgatgaggggaaactacagcacctggaaaatgaactcacccacgatatcatcaccaagttcctggaaaatgaagacagaaggtgattccccaacctgagggtgaccaagaagctgcccacacctcttagccatgttgggactgaggcccatcaggactggccagagggctgaggagggtgaaccccacatccctgggtcactgctactctgtataaacttggcttccagaatgaggccaccactgagttcaggcagcgccatccatgctccatgaggaggacagtacccaggggtgaggaggtaaaggtctcgtccctggggacttcccactccagtgtggacactgtcccttcccaatatccagtgcccagggcagggacagcagcaccaccacacgttctggcagaaccaaaaaggaacagatgggcttcctggcaaaggcagcagtggagtgtggagttcaagggtagaatgtccctggggggacgggggaagagcctgtgtggcaaggcccagaaaagcaaggttcggaattggaacagccaggccatgttcgcagaaggcttgcgtttctctgtcactttatcggtgctgttagattgggtgtcctgtagtaagtgatacttaaacatgagccacacattagtgtatgtgtgtgcattcgtgattatgcccatgccctgctgatctagttcgttttgtacactgtaaaaccaagatgaaaatacaaaaggtgtcgggttcataataggaatcgaggctggaatttctctgttccatgccagcacctcctgaggtctctgctccaggggttgagaaagaacaaagaggctgagagggtaacggatcagagagcccagagccaagctgcccgctcacaccagaccctgctcagggtggcattgtctccccatggaaaaccagagaggagcactcagcctggtgtggtcactcttctcttatccactaaacggttgtcactgggcactgccaccagccccgtgtttctctgggtgtagggccctggggatgttacaggctgggggccaggtgacccaacactacagggcaagatgagacaggcttccaggacacctagaatatcagaggaggtggcatttcaagcttttgtgattcattcgatgttaacattctttgactcaatgtagaagagctaaaagtagaacaaaccaaagccgagttcccatcttagtgtgggtggaggacacaggagtaagtggcagaaataatcagaaaagaaaacacttgcactgtggtgggtcccagaagaacaagaggaatgctgtgccatgccttgaatttcttttctgcacgacaggtctgccagcttacatttacccaaactgtccattactggaacctatgatctgaagagcgtcctgggtcaactgggcatcactaaggtcttcagcaatggggctgacctctccggggtcacagaggaggcacccctgaagctctccaaggtgagatcaccctgacgaccttgttgcaccctggtatctgtagggaagaatgtgtgggggctgcagctctgtcctgaggctgaggaaggggccgagggaaacaaatgaagacccaggctgagctcctgaagatgcccgtgattcactgacacgggacgtggtcaaacagcaaagccaggcaggggactgctgtgcagctggcactttcggggcctcccttgaggttgtgtcactgaccctgaatttcaactttgcccaagaccttctagacattgggccttgatttatccatactgacacagaaaggtttgggctaagttgtttcaaaggaatttctgactccttcgatctgtgagatttggtgtctgaattaatgaatgatttcagctaaagatgacacttattttggaaaactaaaggcgaccaatgaacaactgcagttccatgaatggctgcattatcttggggtctgggcactgtgaaggtcactgccagggtccgtgtcctcaaggagcttcaagccgtgtactagaaaggagagagccctggaggcagacgtggagtgacgatgctcttccctgttctgagttgtgggtgcacctgagcagggggagaggcgcttgtcaggaagatggacagaggggagccagccccatcagccaaagccttgaggaggagcaaggcctatgtgacagggagggagaggatgtgcagggccagggccgtccagggggagtgagcgcttcctgggaggtgtccacgtgagccttgctcgaggcctgggatcagccttacaacgtgtctctgcttctctcccctccaggccgtgcataaggctgtgctgaccatcgacgagaaagggactgaagctgctggggccatgtttttagaggccatacccatgtctatcccccccgaggtcaagttcaacaaaccctttgtcttcttaatgattgaacaaaataccaagtctcccctcttcatgggaaaagtggtgaatcccacccaaaaataactgcctctcgctcctcaacccctcccctccatccctggccccctccctggatgacattaaagaagggttgagctggtccctgcctgcatgtgactgtaaatccctcccatgttttctctgagtctccctttgcctgctgaggctgtatgtgggctccaggtaacagtgctgtcttcgggccccctgaactgtgttcatggagcatctggctgggtaggcacatgctgggcttgaatccaggggggactgaatcctcagcttacggacctgggcccatctgtttctggagggctccagtcttccttgtcctgtcttggagtccccaagaaggaatcacaggggaggaaccagataccagccatgaccccaggctccaccaagcatcttcatgtccccctgctcatcccccactcccccccacccagagttgctcatcctgccagggctggctgtgcccaccccaaggctgccctcctgggggccccagaactgcctgatcgtgccgtggcccagttttgtggcatctgcagcaacacaagagagaggacaatgtcctcctcttgacccgctgtcacctaaccagactcgggccctgcacctctcaggcacttctggaaaatgactgaggcagattcttcctgaagcccattctccatggggcaacaaggacacctattctgtccttgtccttccatcgctgccccagaaagcctcacatatctccgtttagaatcaggtcccttctccccagatgaagaggagggtctctgctttgttttctctatctcctcctcagacttgaccaggcccagcaggccccagaagaccattaccctatatcccttctcctccctagtcacatggccataggcctgctgatggctcaggaaggccattgcaaggactcctcagctatgggagaggaagcacatcacccattgacccccgcaacccctccctttcctcctctgagtcccgactggggccacatgcagcctgacttctttgtgcctgttgctgtccctgcagtcttcagagggccaccgcagctccagtgccacggcaggaggctgttcctgaatagcccctgtggtaagggccaggagagtccttccatcctccaaggccctgctaaaggacacagcagccaggaagtcccctgggcccctagctgaaggacagcctgctccctccgtctctaccaggaatggccttgtcctatggaaggcactgccccatcccaaactaatctaggaatcactgtctaaccactcactgtcatgaatgtgtacttaaaggatgaggttgagtcataccaaatagtgatttcgatagttcaaaatggtgaaattagcaattctacatgattcagtctaatcaatggataccgactgtttcccacacaagtctcctgttctcttaagcttactcactgacagcctttcactctccacaaatacattaaagatatggccatcaccaagccccctaggatgacaccagacctgagagtctgaagacctggatccaagttctgacttttccccctgacagctgtgtgaccttcgtgaagtcgccaaacctctctgagccccagtcattgctagtaagacctgcctttgagttggtatgatgttcaagttagataacaaaatgtttatacccattagaacagagaataaatagaactacatttcttgcacttatgagctttctgtgaatcagacatccctatgaagtacctcccctggctgtttctcatttactcactgtagcagcactgcgatgtgtgagtatatctgctgtgctcttaaactccaaatctgaggaaactgaggctcagagaggctactggtctcccacaatgtcacacagctcataagtggcaaagctggcttgatgggctacttgttcctctgaaccataccacctcaccacactctccccttcgagggtcacgctaaacttctgcagaggtaattcctccttaaaccagaagggttgctggtggcccacagctcacgcctagcacacttcatgagaaaaacaccctgtgcccagtgtggagcaggcattgagctgaaggtggtgagcagaagctcatccaccagatgttgacacagcccgcagccttgggcgacccacaggactcctcttatttaactggcatttggtaggagaacaggggcagagtcaaagacaagttggctttctggagagcccagggcagggaaggaggtggcagcgctgagggcggtcaccttagacaccatcgttttactttgaagaattgtctgtcaca

SEQ ID NO: 430 - DNA, 23 bp, synthetic construct
  source 1..23: mol_type = other DNA
atcgacaagaaagggactgaagc

SEQ ID NO: 431 - protein, 8 aa, synthetic construct
IDKKGTEA

SEQ ID NO: 432 - protein, 12 aa, synthetic construct
EGGSEEEEESGS

SEQ ID NO: 433 - RNA, 20 nt, synthetic construct
  source 1..20: mol_type = other RNA
gacaagaaagggactgaagc

SEQ ID NO: 434 - RNA, 20 nt, synthetic construct
  source 1..20: mol_type = other RNA
atcgacaagaaagggactga

SEQ ID NO: 435 - RNA, 20 nt, synthetic construct
  source 1..20: mol_type = other RNA
acacaccggttggtggcctc

SEQ ID NO: 436 - protein, 1587 aa, synthetic construct
SEVEFSHEYWMRHALTLAKRARDEREVPVGAVLVHNNRVIGEGWNRAIGLHDPTAHAEIMALRQGGLVMQNYRLYDATLYTTFEPCVMCAGAMIHSRIGRVVFGVRNAKTGAAGSLMDVLHYPGMNHRVEITEGILADECAALLCTFFRMPRSVFKAQKKAQSSTDSGGSSGGSSGSETPGTSESATPESSGGSSGGSDKKYSIGLAIGTNSVGWAVITDEYKVPSKKFKVLGNTDRHSIKKNLIGALLFDSGETAEATRLKRTARRRYTRRKNRICYLQEIFSNEMAKVDDSFFHRLEESFLVEEDKKHERHPIFGNIVDEVAYHEKYPTIYHLRKKLVDSTDKADLRLIYLALAHMIKFRGHFLIEGDLNPDNSDVDKLFIQLVQTYNQLFEENPINASGVDAKAILSARLSKSRRLENLIAQLPGEKKNGLFGNLIALSLGLTPNFKSNFDLAEDAKLQLSKDTYDDDLDNLLAQIGDQYADLFLAAKNLSDAILLSDILRVNTEITKAPLSASMVKRYDEHHQDLTLLKALVRQQLPEKYKEIFFDQSKNGYAGYIDGGASQEEFYKFIKPILEKMDGTEELLVKLNREDLLRKQRTFDNGIIPHQIHLGELHAILRRQGDFYPFLKDNREKIEKILTFRIPYYVGPLARGNSRFAWMTRKSEETITPWNFEEVVDKGASAQSFIERMTNFDKNLPNEKVLPKHSLLYEYFTVYNELTKVKYVTEGMRKPAFLSGEQKKAIVDLLFKTNRKVTVKQLKEDYFKKIECFDSVEISGVEDRFNASLGTYHDLLKIIKDKDFLDNEENEDILEDIVLTLTLFEDREMIEERLKTYAHLFDDKVMKQLKRLRYTGWGRLSRKLINGIRDKQSGKTILDFLKSDGFANRNFMQLIHDDSLTFKEDIQKAQVSGQGDSLHEHIANLAGSPAIKKGILQTVKVVDELVKVMGGHKPENIVIEMARENQTTQKGQKNSRERMKRIEEGIKELGSQILKEHPVENTQLQNEKLYLYYLQNGRDMYVDQELDINRLSDYDVDHIVPQSFLKDDSIDNKVLTRSDKNRGKSDNVPSEEVVKKMKNYWRQLLNAKLITQRKFDNLTKAERGGLSELDKAGFIKRQLVETRQITKHVAQILDSRMNTKYDENDKLIREVKVITLKSKLVSDFRKDFQFYKVREINNYHHAHDAYLNAVVGTALIKKYPKLESEFVYGDYKVYDVRKMIAKSEQEIGKATAKYFFYSNIMNFFKTEITLANGEIRKRPLIETNGETGEIVWDKGRDFATVRKVLSMPQVNIVKKTEVQTGGFSKESILPKGNSDKLIARKKDWDPKKYGGFMQPTVAYSVLVVAKVEKGKSKKLKSVKELLGITIMERSSFEKNPIDFLEAKGYKEVKKDLIIKLPKYSLFELENGRKRMLASAKFLQKGNELALPSKYVNFLYLASHYEKLKGSPEDNEQKQLFVEQHKHYLDEIIEQISEFSKRVILADANLDKVLSAYNKHRDKPIREQAENIIHLFTLTNLGAPRAFKYFDTTIARKEYRSTKEVLDATLIHQSITGLYETRIDLSQLGGDEGADKRTADGSEFESPKKKRKV

SEQ ID NO: 437 - DNA, 4761 bp, synthetic construct
  source 1..4761: mol_type = other DNA
tcagaagtcgagtttagccacgaatattggatgcgccacgccctcaccctggccaagagagcccgggacgagcgcgaggtgcccgtgggcgccgtcctggtgcacaacaacagggtgatcggcgagggctggaaccgggccatcggcctgcacgaccccacagcccacgccgagatcatggccctgcggcagggtggcctggtcatgcagaactacaggctgtatgacgccaccctgtacaccacattcgagccctgcgtgatgtgcgccggggccatgatccacagccggatcggccgcgtggtgttcggcgtgcggaacgccaagaccggcgccgccggcagcctgatggacgttctgcactaccccgggatgaaccacagggtggagatcacagagggcatcctggcagacgagtgcgccgccctgctgtgcactttcttcaggatgcccagatctgtgttcaaggcccagaagaaggcccagagctccaccgacagcggcgggagctctgggggctcctccgggagcgagacccccgggaccagcgagtccgccacccccgagagcagcggcggcagctccggggggagcgacaagaagtactccatcggcctggccatcggcaccaactccgtgggttgggccgtgatcaccgatgagtacaaggtgcccagcaagaagttcaaggtgctgggcaacaccgacaggcactctatcaagaagaacctgatcggcgccctgctgttcgacagcggggagaccgctgaggccactcggctgaagagaaccgccaggcgcagatacacccggagaaagaaccggatctgctacctgcaggagatcttcagcaacgagatggccaaggtggacgacagcttcttccacaggctggaggagagcttcctggtggaggaggacaagaagcacgagcgccaccccatcttcggcaacatcgtggatgaggtggcctaccacgagaagtaccccaccatctaccacctgcggaagaagctggtggacagcaccgataaggccgatctgcggctgatctacctggccctggcccacatgatcaagttcagggggcacttcctgatcgagggcgacctgaaccccgacaactccgatgtggataaactgttcatccagctggtgcagacctacaaccagctgtttgaggagaatcccatcaacgcctccggcgtggacgccaaggccatcctgagcgcccggctgtccaagagccggaggctggagaatctgatcgcccagctgcctggcgagaagaagaacggcctgttcggcaacctgatcgccctgagcctgggcctgacccccaatttcaagagcaacttcgacctggccgaggatgctaagctgcagctgtccaaggacacctacgacgatgacctggacaacctgctggctcagatcggcgatcagtacgccgacctgttcctggccgccaagaacctgtcagacgccatcctgctgtctgacattctgcgggtgaacaccgagatcaccaaggccccactgtccgcctctatggtgaagaggtacgatgagcaccaccaggacctgaccctgctgaaggctctggtgcggcagcagctgccggagaagtacaaggagatcttcttcgaccagagcaagaacggctacgccggctacatcgacggcggggccagccaggaggagttctacaagttcatcaagcctatcctggagaagatggacggcaccgaggagctgctggtgaagctgaaccgggaggacctgctgcggaagcagaggaccttcgacaacggcatcattccccaccagatccacctgggcgagctgcacgccatcctgcggaggcagggcgacttctaccctttcctgaaggacaacagggagaagatcgagaagatcctgaccttcaggatcccctactacgtgggccccctggcccgcggcaactcccgctttgcctggatgaccagaaagagcgaggagaccatcaccccttggaacttcgaggaggtggtggacaagggcgccagcgcccagagcttcatcgagcgcatgaccaacttcgacaagaatctgcccaacgagaaggtgctgcccaagcactccctgctgtacgagtacttcaccgtgtacaacgagctgacaaaggtgaagtacgtgacagagggcatgcgcaagcccgccttcctgtctggcgagcagaagaaggccatcgtggacctgctgttcaagaccaacaggaaggtgaccgtgaagcagctgaaggaggactacttcaagaagatcgagtgcttcgacagcgtggagatcagcggcgtggaggacaggttcaacgccagcctgggcacctaccacgacctgctgaagatcatcaaggacaaggacttcctggataacgaggagaacgaggatatcctggaggacattgtcctgaccctgaccctgttcgaggatcgggagatgatcgaggagcgcctcaagacctacgcccacctgttcgacgataaggtgatgaagcagctgaagcggctgcgctacaccggctggggccgcctgtcccggaagctgatcaacggcatccgggacaagcagtccggcaagaccatcctggacttcctgaagtccgatggttttgccaacagaaacttcatgcagctgatccacgacgacagcctgaccttcaaggaggacatccagaaggctcaggtgtccggacagggggactccctgcacgagcacatcgccaacctggccggctctcccgccatcaagaagggcatcctgcagaccgtgaaggtggtggacgagctggtgaaggtgatgggcgggcacaagcccgagaacatcgtgatcgagatggcccgggagaaccagaccacccagaagggccagaagaacagcagggagcgcatgaagcgcatcgaggagggcatcaaggagctgggtagccagatcctgaaggagcaccctgtggagaatacccagctgcagaacgagaagctgtatctgtactacctgcagaacggcagggacatgtacgtggatcaggagctggacatcaaccggctgtctgactacgacgtggaccacatcgtgccccagtctttcctgaaggacgacagcatcgacaacaaggtgctgacccgcagcgacaagaacaggggcaagagcgataacgtgccctccgaggaggtggtcaagaagatgaagaactactggcggcagctgctgaacgccaagctgatcacccagcggaagttcgacaacctgaccaaggccgagagaggcggcctgtccgagctggacaaggccggcttcatcaagcggcagctggtggagacccggcagatcaccaagcacgtcgcccagatcctggactccaggatgaacaccaagtacgacgagaacgacaagctgatcagagaggtgaaggtgatcaccctgaagtccaagctggtgagcgacttcaggaaggatttccagttctacaaggtgcgggagatcaacaactatcaccacgcccacgacgcctacctgaacgccgtcgtgggcaccgctctgatcaagaagtatcctaagctggagagcgagttcgtgtacggcgactacaaggtgtacgacgtgcggaagatgatcgccaagagcgagcaggagatcggcaaggccaccgccaagtacttcttctactccaatatcatgaacttcttcaagaccgagatcaccctggccaacggggagatccggaagcgcccactgatcgagaccaacggcgagaccggcgagatcgtgtgggacaagggcagggacttcgccaccgtgaggaaggtgctgtccatgccccaggtgaacatcgtgaaaaagaccgaggtgcagaccggggggttctccaaggagagcatcctgcccaagggcaacagcgacaagctgatcgcccggaagaaggactgggaccccaagaagtacggaggcttcatgcagcctaccgtggcctactccgtgctggtggtggccaaggtggagaagggcaagtccaagaagctgaagtcagtgaaggagctgctgggcatcaccatcatggagcggtctagcttcgagaagaatcctattgacttcctggaggccaagggctacaaggaggtcaagaaggatctgatcatcaagctgcccaagtacagcctgttcgagctggagaatggccggaagaggatgctggccagcgccaagttcctgcagaagggcaacgagctggccctgcccagcaagtacgtgaacttcctctatctggccagccactacgagaagctgaagggctctccagaggacaacgagcagaagcagctgttcgtggagcagcacaagcactacctggacgagatcatcgagcagatctccgagttcagcaagcgcgtgatcctggccgacgccaacctggacaaggtgctgtccgcttacaacaagcacagggacaagcccatcagggagcaggccgagaacatcatccacctgttcaccctgaccaacctgggcgcccccagggccttcaagtacttcgataccaccatcgccaggaaggagtacagaagtactaaggaggtcctggatgccactctgatccaccagagcatcaccgggctgtacgagacccggatcgacctgtcccagctgggcggcgacgagggcgccgacaagcggacagccgacggcagcgagttcgagagccccaagaagaagcggaaggtg

SEQ ID NO: 438 - protein, 22 aa, synthetic construct
EGADKRTADGSEFESPKKKRKV

SEQ ID NO: 439 - protein, 12 aa, synthetic construct
KGPKPKKEESEK

SEQ ID NO: 440 - protein, 1587 aa, synthetic construct
SEVEFSHEYWMRHALTLAKRARDEREVPVGAVLVHNNRVIGEGWNRAIGLHDPTAHAEIMALRQGGLVMQNYRLYDATLYTTFEPCVMCAGAMIHSRIGRVVFGVRNAKTGAAGSLMDVLHYPGMNHRVEITEGILADECAALLCTFFRMPRSVFKAQKKAQSSTDSGGSSGGSSGSETPGTSESATPESSGGSSGGSDKKYSIGLAIGTNSVGWAVITDEYKVPSKKFKVLGNTDRHSIKKNLIGALLFDSGETAEATRLKRTARRRYTRRKNRICYLQEIFSNEMAKVDDSFFHRLEESFLVEEDKKHERHPIFGNIVDEVAYHEKYPTIYHLRKKLVDSTDKADLRLIYLALAHMIKFRGHFLIEGDLNPDNSDVDKLFIQLVQTYNQLFEENPINASGVDAKAILSARLSKSRRLENLIAQLPGEKKNGLFGNLIALSLGLTPNFKSNFDLAEDAKLQLSKDTYDDDLDNLLAQIGDQYADLFLAAKNLSDAILLSDILRVNTEITKAPLSASMVKRYDEHHQDLTLLKALVRQQLPEKYKEIFFDQSKNGYAGYIDGGASQEEFYKFIKPILEKMDGTEELLVKLNREDLLRKQRTFDNGIIPHQIHLGELHAILRRQGDFYPFLKDNREKIEKILTFRIPYYVGPLARGNSRFAWMTRKSEETITPWNFEEVVDKGASAQSFIERMTNFDKNLPNEKVLPKHSLLYEYFTVYNELTKVKYVTEGMRKPAFLSGEQKKAIVDLLFKTNRKVTVKQLKEDYFKKIECFDSVEISGVEDRFNASLGTYHDLLKIIKDKDFLDNEENEDILEDIVLTLTLFEDREMIEERLKTYAHLFDDKVMKQLKRLRYTGWGRLSRKLINGIRDKQSGKTILDFLKSDGFANRNFMQLIHDDSLTFKEDIQKAQVSGQGDSLHEHIANLAGSPAIKKGILQTVKVVDELVKVMGGHKPENIVIEMARENQTTQKGQKNSRERMKRIEEGIKELGSQILKEHPVENTQLQNEKLYLYYLQNGRDMYVDQELDINRLSDYDVDHIVPQSFLKDDSIDNKVLTRSDKNRGKSDNVPSEEVVKKMKNYWRQLLNAKLITQRKFDNLTKAERGGLSELDKAGFIKRQLVETRQITKHVAQILDSRMNTKYDENDKLIREVKVITLKSKLVSDFRKDFQFYKVREINNYHHAHDAYLNAVVGTALIKKYPKLESEFVYGDYKVYDVRKMIAKSEQEIGKATAKYFFYSNIMNFFKTEITLANGEIRKRPLIETNGETGEIVWDKGRDFATVRKVLSMPQVNIVKKTEVQTGGFSKESILPKGNSDKLIARKKDWDPKKYGGFMQPTVAYSVLVVAKVEKGKSKKLKSVKELLGITIMERSSFEKNPIDFLEAKGYKEVKKDLIIKLPKYSLFELENGRKRMLASAKFLQKGNELALPSKYVNFLYLASHYEKLKGSPEDNEQKQLFVEQHKHYLDEIIEQISEFSKRVILADANLDKVLSAYNKHRDKPIREQAENIIHLFTLTNLGAPRAFKYFDTTIARKEYKSTKEVLDATLIHQSITGLYETRIDLSQLGGDEGADKRTADGSEFESPKKKRKV

SEQ ID NO: 441 - protein, 1753 aa, synthetic construct
SEVEFSHEYWMRHALTLAKRARDEREVPVGAVLVHNNRVIGEGWNRAIGLHDPTAHAEIMALRQGGLVMQNYRLYDATLYTTFEPCVMCAGAMIHSRIGRVVFGVRNAKTGAAGSLMDVLHYPGMNHRVEITEGILADECAALLCTFFRMPRSVFKAQKKAQSSTDSGGSSGGSSGSETPGTSESATPESSGGSSGGSDKKYSIGLAIGTNSVGWAVITDEYKVPSKKFKVLGNTDRHSIKKNLIGALLFDSGETAEATRLKRTARRRYTRRKNRICYLQEIFSNEMAKVDDSFFHRLEESFLVEEDKKHERHPIFGNIVDEVAYHEKYPTIYHLRKKLVDSTDKADLRLIYLALAHMIKFRGHFLIEGDLNPDNSDVDKLFIQLVQTYNQLFEENPINASGVDAKAILSARLSKSRRLENLIAQLPGEKKNGLFGNLIALSLGLTPNFKSNFDLAEDAKLQLSKDTYDDDLDNLLAQIGDQYADLFLAAKNLSDAILLSDILRVNTEITKAPLSASMVKRYDEHHQDLTLLKALVRQQLPEKYKEIFFDQSKNGYAGYIDGGASQEEFYKFIKPILEKMDGTEELLVKLNREDLLRKQRTFDNGIIPHQIHLGELHAILRRQGDFYPFLKDNREKIEKILTFRIPYYVGPLARGNSRFAWMTRKSEETITPWNFEEVVDKGASAQSFIERMTNFDKNLPNEKVLPKHSLLYEYFTVYNELTKVKYVTEGMRKPAFLSGEQKKAIVDLLFKTNRKVTVKQLKEDYFKKIECFDSVEISGVEDRFNASLGTYHDLLKIIKDKDFLDNEENEDILEDIVLTLTLFEDREMIEERLKTYAHLFDDKVMKQLKRLRYTGWGRLSRKLINGIRDKQSGKTILDFLKSDGFANRNFMQLIHDDSLTFKEDIQKAQVSGQGDSLHEHIANLAGSPAIKKGILQTVKVVDELVKVMGGHKPENIVIEMARENQTTQKGQKNSRERMKRIEEGIKELGSQILKEHPVENTQLQNEKLYLYYLQNGRDMYVDQELDINRLSDYDVDHIVPQSFLKDDSIDNKSEVEFSHEYWMRHALTLAKRARDEREVPVGAVLVHNNRVIGEGWNRAIGLHDPTAHAEIMALRQGGLVMQNYRLYDATLYTTFEPCVMCAGAMIHSRIGRVVFGVRNAKTGAAGSLMDVLHYPGMNHRVEITEGILADECAALLCTFFRMPRSVFKAQKKAQSSTDVLTRSDKNRGKSDNVPSEEVVKKMKNYWRQLLNAKLITQRKFDNLTKAERGGLSELDKAGFIKRQLVETRQITKHVAQILDSRMNTKYDENDKLIREVKVITLKSKLVSDFRKDFQFYKVREINNYHHAHDAYLNAVVGTALIKKYPKLESEFVYGDYKVYDVRKMIAKSEQEIGKATAKYFFYSNIMNFFKTEITLANGEIRKRPLIETNGETGEIVWDKGRDFATVRKVLSMPQVNIVKKTEVQTGGFSKESILPKGNSDKLIARKKDWDPKKYGGFMYPTVAYSVLVVAKVEKGKSKKLKSVKELLGITIMERSSFEKNPIDFLEAKGYKEVKKDLIIKLPKYSLFELENGRKRMLASAKFLQKGNELALPSKYVNFLYLASHYEKLKGSPEDNEQKQLFVEQHKHYLDEIIEQISEFSKRVILADANLDKVLSAYNKHRDKPIREQAENIIHLFTLTNLGAPRAFKYFDTTIARKEYKSTKEVLDATLIHQSITGLYETRIDLSQLGGDEGADKRTADGSEFESPKKKRKV

SEQ ID NO: 442 - protein, 1567 aa, synthetic construct
SEVEFSHEYWMRHALTLAKRARDEREVPVGAVLVHNNRVIGEGWNRAIGLHDPTAHAEIMALRQGGLVMQNYRLYDATLYTTFEPCVMCAGAMIHSRIGRVVFGVRNAKTGAAGSLMDVLHYPGMNHRVEITEGILADECAALLCTFFRMPRSVFKAQKKAQSSTDEGGSEEEEESGSDKKYSIGLAIGTNSVGWAVITDEYKVPSKKFKVLGNTDRHSIKKNLIGALLFDSGETAEATRLKRTARRRYTRRKNRICYLQEIFSNEMAKVDDSFFHRLEESFLVEEDKKHERHPIFGNIVDEVAYHEKYPTIYHLRKKLVDSTDKADLRLIYLALAHMIKFRGHFLIEGDLNPDNSDVDKLFIQLVQTYNQLFEENPINASGVDAKAILSARLSKSRRLENLIAQLPGEKKNGLFGNLIALSLGLTPNFKSNFDLAEDAKLQLSKDTYDDDLDNLLAQIGDQYADLFLAAKNLSDAILLSDILRVNTEITKAPLSASMVKRYDEHHQDLTLLKALVRQQLPEKYKEIFFDQSKNGYAGYIDGGASQEEFYKFIKPILEKMDGTEELLVKLNREDLLRKQRTFDNGIIPHQIHLGELHAILRRQGDFYPFLKDNREKIEKILTFRIPYYVGPLARGNSRFAWMTRKSEETITPWNFEEVVDKGASAQSFIERMTNFDKNLPNEKVLPKHSLLYEYFTVYNELTKVKYVTEGMRKPAFLSGEQKKAIVDLLFKTNRKVTVKQLKEDYFKKIECFDSVEISGVEDRFNASLGTYHDLLKIIKDKDFLDNEENEDILEDIVLTLTLFEDREMIEERLKTYAHLFDDKVMKQLKRLRYTGWGRLSRKLINGIRDKQSGKTILDFLKSDGFANRNFMQLIHDDSLTFKEDIQKAQVSGQGDSLHEHIANLAGSPAIKKGILQTVKVVDELVKVMGGHKPENIVIEMARENQTTQKGQKNSRERMKRIEEGIKELGSQILKEHPVENTQLQNEKLYLYYLQNGRDMYVDQELDINRLSDYDVDHIVPQSFLKDDSIDNKVLTRSDKNRGKSDNVPSEEVVKKMKNYWRQLLNAKLITQRKFDNLTKAERGGLSELDKAGFIKRQLVETRQITKHVAQILDSRMNTKYDENDKLIREVKVITLKSKLVSDFRKDFQFYKVREINNYHHAHDAYLNAVVGTALIKKYPKLESEFVYGDYKVYDVRKMIAKSEQEIGKATAKYFFYSNIMNFFKTEITLANGEIRKRPLIETNGETGEIVWDKGRDFATVRKVLSMPQVNIVKKTEVQTGGFSKESILPKGNSDKLIARKKDWDPKKYGGFLYPTVAYSVLVVAKVEKGKSKKLKSVKELLGITIMERSSFEKNPIDFLEAKGYKEVKKDLIIKLPKYSLFELENGRKRMLASAKFLQKGNELALPSKYVNFLYLASHYEKLKGSPEDNEQKQLFVEQHKHYLDEIIEQISEFSKRVILADANLDKVLSAYNKHRDKPIREQAENIIHLFTLTNLGAPRAFKYFDTTIARKEYKSTKEVLDATLIHQSITGLYETRIDLSQLGGDEGADKRTADGSEFESPKKKRKV

SEQ ID NO: 443 - protein, 1567 aa, synthetic construct
SEVEFSHEYWMRHALTLAKRARDEREVPVGAVLVHNNRVIGEGWNRAIGLHDPTAHAEIMALRQGGLVMQNYRLYDATLYTTFEPCVMCAGAMIHSRIGRVVFGVRNAKTGAAGSLMDVLHYPGMNHRVEITEGILADECAALLCTFFRMPRSVFKAQKKAQSSTDEGGSEEEEESGSDKKYSIGLAIGTNSVGWAVITDEYKVPSKKFKVLGNTDRHSIKKNLIGALLFDSGETAEATRLKRTARRRYTRRKNRICYLQEIFSNEMAKVDDSFFHRLEESFLVEEDKKHERHPIFGNIVDEVAYHEKYPTIYHLRKKLVDSTDKADLRLIYLALAHMIKFRGHFLIEGDLNPDNSDVDKLFIQLVQTYNQLFEENPINASGVDAKAILSARLSKSRRLENLIAQLPGEKKNGLFGNLIALSLGLTPNFKSNFDLAEDAKLQLSKDTYDDDLDNLLAQIGDQYADLFLAAKNLSDAILLSDILRVNTEITKAPLSASMVKRYDEHHQDLTLLKALVRQQLPEKYKEIFFDQSKNGYAGYIDGGASQEEFYKFIKPILEKMDGTEELLVKLNREDLLRKQRTFDNGIIPHQIHLGELHAILRRQGDFYPFLKDNREKIEKILTFRIPYYVGPLARGNSRFAWMTRKSEETITPWNFEEVVDKGASAQSFIERMTNFDKNLPNEKVLPKHSLLYEYFTVYNELTKVKYVTEGMRKPAFLSGEQKKAIVDLLFKTNRKVTVKQLKEDYFKKIECFDSVEISGVEDRFNASLGTYHDLLKIIKDKDFLDNEENEDILEDIVLTLTLFEDREMIEERLKTYAHLFDDKVMKQLKRLRYTGWGRLSRKLINGIRDKQSGKTILDFLKSDGFANRNFMQLIHDDSLTFKEDIQKAQVSGQGDSLHEHIANLAGSPAIKKGILQTVKVVDELVKVMGGHKPENIVIEMARENQTTQKGQKNSRERMKRIEEGIKELGSQILKEHPVENTQLQNEKLYLYYLQNGRDMYVDQELDINRLSDYDVDHIVPQSFLKDDSIDNKVLTRSDKNRGKSDNVPSEEVVKKMKNYWRQLLNAKLITQRKFDNLTKAERGGLSELDKAGFIKRQLVETRQITKHVAQILDSRMNTKYDENDKLIREVKVITLKSKLVSDFRKDFQFYKVREINNYHHAHDAYLNAVVGTALIKKYPKLESEFVYGDYKVYDVRKMIAKSEQEIGKATAKYFFYSNIMNFFKTEITLANGEIRKRPLIETNGETGEIVWDKGRDFATVRKVLSMPQVNIVKKTEVQTGGFSKESILPKGNSDKLIARKKDWDPKKYGGFMYPTVAYSVLVVAKVEKGKSKKLKSVKELLGITIMERSSFEKNPIDFLEAKGYKEVKKDLIIKLPKYSLFELENGRKRMLASAKFLQKGNELALPSKYVNFLYLASHYEKLKGSPEDNEQKQLFVEQHKHYLDEIIEQISEFSKRVILADANLDKVLSAYNKHRDKPIREQAENIIHLFTLTNLGAPRAFKYFDTTIARKEYKSTKEVLDATLIHQSITGLYETRIDLSQLGGDEGADKRTADGSEFESPKKKRKV

SEQ ID NO: 444 - protein, 1567 aa, synthetic construct
SEVEFSHEYWMRHALTLAKRARDEREVPVGAVLVHNNRVIGEGWNRAIGLHDPTAHAEIMALRQGGLVMQNYRLYDATLYTTFEPCVMCAGAMIHSRIGRVVFGVRNAKTGAAGSLMDVLHYPGMNHRVEITEGILADECAALLCTFFRMPRSVFKAQKKAQSSTDKGPKPKKEESEKDKKYSIGLAIGTNSVGWAVITDEYKVPSKKFKVLGNTDRHSIKKNLIGALLFDSGETAEATRLKRTARRRYTRRKNRICYLQEIFSNEMAKVDDSFFHRLEESFLVEEDKKHERHPIFGNIVDEVAYHEKYPTIYHLRKKLVDSTDKADLRLIYLALAHMIKFRGHFLIEGDLNPDNSDVDKLFIQLVQTYNQLFEENPINASGVDAKAILSARLSKSRRLENLIAQLPGEKKNGLFGNLIALSLGLTPNFKSNFDLAEDAKLQLSKDTYDDDLDNLLAQIGDQYADLFLAAKNLSDAILLSDILRVNTEITKAPLSASMVKRYDEHHQDLTLLKALVRQQLPEKYKEIFFDQSKNGYAGYIDGGASQEEFYKFIKPILEKMDGTEELLVKLNREDLLRKQRTFDNGIIPHQIHLGELHAILRRQGDFYPFLKDNREKIEKILTFRIPYYVGPLARGNSRFAWMTRKSEETITPWNFEEVVDKGASAQSFIERMTNFDKNLPNEKVLPKHSLLYEYFTVYNELTKVKYVTEGMRKPAFLSGEQKKAIVDLLFKTNRKVTVKQLKEDYFKKIECFDSVEISGVEDRFNASLGTYHDLLKIIKDKDFLDNEENEDILEDIVLTLTLFEDREMIEERLKTYAHLFDDKVMKQLKRLRYTGWGRLSRKLINGIRDKQSGKTILDFLKSDGFANRNFMQLIHDDSLTFKEDIQKAQVSGQGDSLHEHIANLAGSPAIKKGILQTVKVVDELVKVMGGHKPENIVIEMARENQTTQKGQKNSRERMKRIEEGIKELGSQILKEHPVENTQLQNEKLYLYYLQNGRDMYVDQELDINRLSDYDVDHIVPQSFLKDDSIDNKVLTRSDKNRGKSDNVPSEEVVKKMKNYWRQLLNAKLITQRKFDNLTKAERGGLSELDKAGFIKRQLVETRQITKHVAQILDSRMNTKYDENDKLIREVKVITLKSKLVSDFRKDFQFYKVREINNYHHAHDAYLNAVVGTALIKKYPKLESEFVYGDYKVYDVRKMIAKSEQEIGKATAKYFFYSNIMNFFKTEITLANGEIRKRPLIETNGETGEIVWDKGRDFATVRKVLSMPQVNIVKKTEVQTGGFSKESILPKGNSDKLIARKKDWDPKKYGGFLYPTVAYSVLVVAKVEKGKSKKLKSVKELLGITIMERSSFEKNPIDFLEAKGYKEVKKDLIIKLPKYSLFELENGRKRMLASAKFLQKGNELALPSKYVNFLYLASHYEKLKGSPEDNEQKQLFVEQHKHYLDEIIEQISEFSKRVILADANLDKVLSAYNKHRDKPIREQAENIIHLFTLTNLGAPRAFKYFDTTIARKEYKSTKEVLDATLIHQSITGLYETRIDLSQLGGDEGADKRTADGSEFESPKKKRKV

SEQ ID NO: 445 - protein, 1587 aa, synthetic construct
SEVEFSHEYWMRHALTLAKRARDEREVPVGAVLVHNNRVIGEGWNRAIGLHDPTAHAEIMALRQGGLVMQNYRLYDATLYTTFEPCVMCAGAMIHSRIGRVVFGVRNAKTGAAGSLMDVLHYPGMNHRVEITEGILADECAALLCTFFRMPRSVFKAQKKAQSSTDSGGSSGGSSGSETPGTSESATPESSGGSSGGSDKKYSIGLAIGTNSVGWAVITDEYKVPSKKFKVLGNTDRHSIKKNLIGALLFDSGETAEATRLKRTARRRYTRRKNRICYLQEIFSNEMAKVDDSFFHRLEESFLVEEDKKHERHPIFGNIVDEVAYHEKYPTIYHLRKKLVDSTDKADLRLIYLALAHMIKFRGHFLIEGDLNPDNSDVDKLFIQLVQTYNQLFEENPINASGVDAKAILSARLSKSRRLENLIAQLPGEKKNGLFGNLIALSLGLTPNFKSNFDLAEDAKLQLSKDTYDDDLDNLLAQIGDQYADLFLAAKNLSDAILLSDILRVNTEITKAPLSASMVKRYDEHHQDLTLLKALVRQQLPEKYKEIFFDQSKNGYAGYIDGGASQEEFYKFIKPILEKMDGTEELLVKLNREDLLRKQRTFDNGIIPHQIHLGELHAILRRQGDFYPFLKDNREKIEKILTFRIPYYVGPLARGNSRFAWMTRKSEETITPWNFEEVVDKGASAQSFIERMTNFDKNLPNEKVLPKHSLLYEYFTVYNELTKVKYVTEGMRKPAFLSGEQKKAIVDLLFKTNRKVTVKQLKEDYFKKIECFDSVEISGVEDRFNASLGTYHDLLKIIKDKDFLDNEENEDILEDIVLTLTLFEDREMIEERLKTYAHLFDDKVMKQLKRLRYTGWGRLSRKLINGIRDKQSGKTILDFLKSDGFANRNFMQLIHDDSLTFKEDIQKAQVSGQGDSLHEHIANLAGSPAIKKGILQTVKVVDELVKVMGGHKPENIVIEMARENQTTQKGQKNSRERMKRIEEGIKELGSQILKEHPVENTQLQNEKLYLYYLQNGRDMYVDQELDINRLSDYDVDHIVPQSFLKDDSIDNKVLTRSDKNRGKSDNVPSEEVVKKMKNYWRQLLNAKLITQRKFDNLTKAERGGLSELDKAGFIKRQLVETRQITKHVAQILDSRMNTKYDENDKLIREVKVITLKSKLVSDFRKDFQFYKVREINNYHHAHDAYLNAVVGTALIKKYPKLESEFVYGDYKVYDVRKMIAKSEQEIGKATAKYFFYSNIMNFFKTEITLANGEIRKRPLIETNGETGEIVWDKGRDFATVRKVLSMPQVNIVKKTEVQTGGFSKESILPKGNSDKLIARKKDWDPKKYGGFLYPTVAYSVLVVAKVEKGKSKKLKSVKELLGITIMERSSFEKNPIDFLEAKGYKEVKKDLIIKLPKYSLFELENGRKRMLASAKFLQKGNELALPSKYVNFLYLASHYEKLKGSPEDNEQKQLFVEQHKHYLDEIIEQISEFSKRVILDDANLDKVLSAYNKHRDKPIREQAENIIHLFTLTNLGAPRAFKYFDTTIARKEYKSTKEVLDATLIHQSITGLYETRIDLSQLGGDEGADKRTADGSEFESPKKKRKV

SEQ ID NO: 446 - protein, 1587 aa, synthetic construct
SEVEFSHEYWMRHALTLAKRARDEREVPVGAVLVHNNRVIGEGWNRAIGLHDPTAHAEIMALRQGGLVMQNYRLYDATLYTTFEPCVMCAGAMIHSRIGRVVFGVRNAKTGAAGSLMDVLHYPGMNHRVEITEGILADECAALLCTFFRMPRSVFKAQKKAQSSTDSGGSSGGSSGSETPGTSESATPESSGGSSGGSDKKYSIGLAIGTNSVGWAVITDEYKVPSKKFKVLGNTDRHSIKKNLIGALLFDSGETAEATRLKRTARRRYTRRKNRICYLQEIFSNEMAKVDDSFFHRLEESFLVEEDKKHERHPIFGNIVDEVAYHEKYPTIYHLRKKLVDSTDKADLRLIYLALAHMIKFRGHFLIEGDLNPDNSDVDKLFIQLVQTYNQLFEENPINASGVDAKAILSARLSKSRRLENLIAQLPGEKKNGLFGNLIALSLGLTPNFKSNFDLAEDAKLQLSKDTYDDDLDNLLAQIGDQYADLFLAAKNLSDAILLSDILRVNTEITKAPLSASMVKRYDEHHQDLTLLKALVRQQLPEKYKEIFFDQSKNGYAGYIDGGASQEEFYKFIKPILEKMDGTEELLVKLNREDLLRKQRTFDNGIIPHQIHLGELHAILRRQGDFYPFLKDNREKIEKILTFRIPYYVGPLARGNSRFAWMTRKSEETITPWNFEEVVDKGASAQSFIERMTNFDKNLPNEKVLPKHSLLYEYFTVYNELTKVKYVTEGMRKPAFLSGEQKKAIVDLLFKTNRKVTVKQLKEDYFKKIECFDSVEISGVEDRFNASLGTYHDLLKIIKDKDFLDNEENEDILEDIVLTLTLFEDREMIEERLKTYAHLFDDKVMKQLKRLRYTGWGRLSRKLINGIRDKQSGKTILDFLKSDGFANRNFMQLIHDDSLTFKEDIQKAQVSGQGDSLHEHIANLAGSPAIKKGILQTVKVVDELVKVMGGHKPENIVIEMARENQTTQKGQKNSRERMKRIEEGIKELGSQILKEHPVENTQLQNEKLYLYYLQNGRDMYVDQELDINRLSDYDVDHIVPQSFLKDDSIDNKVLTRSDKNRGKSDNVPSEEVVKKMKNYWRQLLNAKLITQRKFDNLTKAERGGLSELDKAGFIKRQLVETRQITKHVAQILDSRMNTKYDENDKLIREVKVITLKSKLVSDFRKDFQFYKVREINNYHHAHDAYLNAVVGTALIKKYPKLESEFVYGDYKVYDVRKMIAKSEQEIGKATAKYFFYSNIMNFFKTEITLANGEIRKRPLIETNGETGEIVWDKGRDFATVRKVLSMPQVNIVKKTEVQTGGFSKESILPKGNSDKLIARKKDWDPKKYGGFLQPTVAYSVLVVAKVEKGKSKKLKSVKELLGITIMERSSFEKNPIDFLEAKGYKEVKKDLIIKLPKYSLFELENGRKRMLASAKFLQKGNELALPSKYVNFLYLASHYEKLKGSPKDNEQKQLFVEQHKHYLDEIIEQISEFSKRVILDDANLDKVLSAYNKHRDKPIREQAENIIHLFTLTNLGAPRAFKYFDTTIARKEYKSTKEVLDATLIHQSITGLYETRIDLSQLGGDEGADKRTADGSEFESPKKKRKV

SEQ ID NO: 447 - protein, 1587 aa, synthetic construct
SEVEFSHEYWMRHALTLAKRARDEREVPVGAVLVHNNRVIGEGWNRAIGLHDPTAHAEIMALRQGGLVMQNYRLYDATLYTTFEPCVMCAGAMIHSRIGRVVFGVRNAKTGAAGSLMDVLHYPGMNHRVEITEGILADECAALLCTFFRMPRSVFKAQKKAQSSTDSGGSSGGSSGSETPGTSESATPESSGGSSGGSDKKYSIGLAIGTNSVGWAVITDEYKVPSKKFKVLGNTDRHSIKKNLIGALLFDSGETAEATRLKRTARRRYTRRKNRICYLQEIFSNEMAKVDDSFFHRLEESFLVEEDKKHERHPIFGNIVDEVAYHEKYPTIYHLRKKLVDSTDKADLRLIYLALAHMIKFRGHFLIEGDLNPDNSDVDKLFIQLVQTYNQLFEENPINASGVDAKAILSARLSKSRRLENLIAQLPGEKKNGLFGNLIALSLGLTPNFKSNFDLAEDAKLQLSKDTYDDDLDNLLAQIGDQYADLFLAAKNLSDAILLSDILRVNTEITKAPLSASMVKRYDEHHQDLTLLKALVRQQLPEKYKEIFFDQSKNGYAGYIDGGASQEEFYKFIKPILEKMDGTEELLVKLNREDLLRKQRTFDNGIIPHQIHLGELHAILRRQGDFYPFLKDNREKIEKILTFRIPYYVGPLARGNSRFAWMTRKSEETITPWNFEEVVDKGASAQSFIERMTNFDKNLPNEKVLPKHSLLYEYFTVYNELTKVKYVTEGMRKPAFLSGEQKKAIVDLLFKTNRKVTVKQLKEDYFKKIECFDSVEISGVEDRFNASLGTYHDLLKIIKDKDFLDNEENEDILEDIVLTLTLFEDREMIEERLKTYAHLFDDKVMKQLKRLRYTGWGRLSRKLINGIRDKQSGKTILDFLKSDGFANRNFMQLIHDDSLTFKEDIQKAQVSGQGDSLHEHIANLAGSPAIKKGILQTVKVVDELVKVMGGHKPENIVIEMARENQTTQKGQKNSRERMKRIEEGIKELGSQILKEHPVENTQLQNEKLYLYYLQNGRDMYVDQELDINRLSDYDVDHIVPQSFLKDDSIDNKVLTRSDKNRGKSDNVPSEEVVKKMKNYWRQLLNAKLITQRKFDNLTKAERGGLSELDKAGFIKRQLVETRQITKHVAQILDSRMNTKYDENDKLIREVKVITLKSKLVSDFRKDFQFYKVREINNYHHAHDAYLNAVVGTALIKKYPKLESEFVYGDYKVYDVRKMIAKSEQEIGKATAKYFFYSNIMNFFKTEITLANGEIRKRPLIETNGETGEIVWDKGRDFATVRKVLSMPQVNIVKKTEVQTGGFSKESILPKGNSDKLIARKKDWDPKKYGGFMYPTVAYSVLVVAKVEKGKSKKLKSVKELLGITIMERSSFEKNPIDFLEAKGYKEVKKDLIIKLPKYSLFELENGRKRMLASAKFLQKGNELALPSKYVNFLYLASHYEKLKGSPKDNEQKQLFVEQHKHYLDEIIEQISEFSKRVILDDANLDKVLSAYNKHRDKPIREQAENIIHLFTLTNLGAPRAFKYFDTTIARKEYRSTKEVLDATLIHQSITGLYETRIDLSQLGGDEGADKRTADGSEFESPKKKRKV

SEQ ID NO: 448 - protein, 1567 aa, synthetic construct
SEVEFSHEYWMRHALTLAKRARDEREVPVGAVLVHNNRVIGEGWNRAIGLHDPTAHAEIMALRQGGLVMQNYRLYDATLYTTFEPCVMCAGAMIHSRIGRVVFGVRNAKTGAAGSLMDVLHYPGMNHRVEITEGILADECAALLCTFFRMPRSVFKAQKKAQSSTDKGPKPKKEESEKDKKYSIGLAIGTNSVGWAVITDEYKVPSKKFKVLGNTDRHSIKKNLIGALLFDSGETAEATRLKRTARRRYTRRKNRICYLQEIFSNEMAKVDDSFFHRLEESFLVEEDKKHERHPIFGNIVDEVAYHEKYPTIYHLRKKLVDSTDKADLRLIYLALAHMIKFRGHFLIEGDLNPDNSDVDKLFIQLVQTYNQLFEENPINASGVDAKAILSARLSKSRRLENLIAQLPGEKKNGLFGNLIALSLGLTPNFKSNFDLAEDAKLQLSKDTYDDDLDNLLAQIGDQYADLFLAAKNLSDAILLSDILRVNTEITKAPLSASMVKRYDEHHQDLTLLKALVRQQLPEKYKEIFFDQSKNGYAGYIDGGASQEEFYKFIKPILEKMDGTEELLVKLNREDLLRKQRTFDNGIIPHQIHLGELHAILRRQGDFYPFLKDNREKIEKILTFRIPYYVGPLARGNSRFAWMTRKSEETITPWNFEEVVDKGASAQSFIERMTNFDKNLPNEKVLPKHSLLYEYFTVYNELTKVKYVTEGMRKPAFLSGEQKKAIVDLLFKTNRKVTVKQLKEDYFKKIECFDSVEISGVEDRFNASLGTYHDLLKIIKDKDFLDNEENEDILEDIVLTLTLFEDREMIEERLKTYAHLFDDKVMKQLKRLRYTGWGRLSRKLINGIRDKQSGKTILDFLKSDGFANRNFMQLIHDDSLTFKEDIQKAQVSGQGDSLHEHIANLAGSPAIKKGILQTVKVVDELVKVMGGHKPENIVIEMARENQTTQKGQKNSRERMKRIEEGIKELGSQILKEHPVENTQLQNEKLYLYYLQNGRDMYVDQELDINRLSDYDVDHIVPQSFLKDDSIDNKVLTRSDKNRGKSDNVPSEEVVKKMKNYWRQLLNAKLITQRKFDNLTKAERGGLSELDKAGFIKRQLVETRQITKHVAQILDSRMNTKYDENDKLIREVKVITLKSKLVSDFRKDFQFYKVREINNYHHAHDAYLNAVVGTALIKKYPKLESEFVYGDYKVYDVRKMIAKSEQEIGKATAKYFFYSNIMNFFKTEITLANGEIRKRPLIETNGETGEIVWDKGRDFATVRKVLSMPQVNIVKKTEVQTGGFSKESILPKGNSDKLIARKKDWDPKKYGGFLYPTVAYSVLVVAKVEKGKSKKLKSVKELLGITIMERSSFEKNPIDFLEAKGYKEVKKDLIIKLPKYSLFELENGRKRMLASAKFLQKGNELALPSKYVNFLYLASHYEKLKGSPEDNEQKQLFVEQHKHYLDEIIEQISEFSKRVILDDANLDKVLSAYNKHRDKPIREQAENIIHLFTLTNLGAPRAFKYFDTTIARKEYKSTKEVLDATLIHQSITGLYETRIDLSQLGGDEGADKRTADGSEFESPKKKRKV

SEQ ID NO: 449 - protein, 1587 aa, synthetic construct
SEVEFSHEYWMRHALTLAKRARDEREVPVGAVLVHNNRVIGEGWNRAIGLHDPTAHAEIMALRQGGLVMQNYRLYDATLYTTFEPCVMCAGAMIHSRIGRVVFGVRNAKTGAAGSLMDVLHYPGMNHRVEITEGILADECAALLCTFFRMPRSVFKAQKKAQSSTDSGGSSGGSSGSETPGTSESATPESSGGSSGGSDKKYSIGLAIGTNSVGWAVITDEYKVPSKKFKVLGNTDRHSIKKNLIGALLFDSGETAEATRLKRTARRRYTRRKNRICYLQEIFSNEMAKVDDSFFHRLEESFLVEEDKKHERHPIFGNIVDEVAYHEKYPTIYHLRKKLVDSTDKADLRLIYLALAHMIKFRGHFLIEGDLNPDNSDVDKLFIQLVQTYNQLFEENPINASGVDAKAILSARLSKSRRLENLIAQLPGEKKNGLFGNLIALSLGLTPNFKSNFDLAEDAKLQLSKDTYDDDLDNLLAQIGDQYADLFLAAKNLSDAILLSDILRVNTEITKAPLSASMVKRYDEHHQDLTLLKALVRQQLPEKYKEIFFDQSKNGYAGYIDGGASQEEFYKFIKPILEKMDGTEELLVKLNREDLLRKQRTFDNGIIPHQIHLGELHAILRRQGDFYPFLKDNREKIEKILTFRIPYYVGPLARGNSRFAWMTRKSEETITPWNFEEVVDKGASAQSFIERMTNFDKNLPNEKVLPKHSLLYEYFTVYNELTKVKYVTEGMRKPAFLSGEQKKAIVDLLFKTNRKVTVKQLKEDYFKKIECFDSVEISGVEDRFNASLGTYHDLLKIIKDKDFLDNEENEDILEDIVLTLTLFEDREMIEERLKTYAHLFDDKVMKQLKRLRYTGWGRLSRKLINGIRDKQSGKTILDFLKSDGFANRNFMQLIHDDSLTFKEDIQKAQVSGQGDSLHEHIANLAGSPAIKKGILQTVKVVDELVKVMGGHKPENIVIEMAAENATTQKGQKNSRERMKRIEEGIKELGSQILKEHPVENTQLQNEKLYLYYLQNGRDMYVDQELDINRLSDYDVDHIVPQSFLKDDSIDNKVLTRSDKNRGKSDNVPSEEVVKKMKNYWRQLLNAKLITQRKFDNLTKAERGGLSELDKAGFIKRQLVETRQITKHVAQILDSRMNTKYDENDKLIREVKVITLKSKLVSDFRKDFQFYKVREINNYHHAHDAYLNAVVGTALIKKYPKLESEFVYGDYKVYDVRKMIAKSEQEIGKATAKYFFYSNIMNFFKTEITLANGEIRKRPLIETNGETGEIVWDKGRDFATVRKVLSMPQVNIVKKTEVQTGGFSKESILPKGNSDKLIARKKDWDPKKYGGFLYPTVAYSVLVVAKVEKGKSKKLKSVKELLGITIMERSSFEKNPIDFLEAKGYKEVKKDLIIKLPKYSLFELENGRKRMLASAKFLQKGNELALPSKYVNFLYLASHYEKLKGSPEDNEQKQLFVEQHKHYLDEIIEQISEFSKRVILDDANLDKVLSAYNKHRDKPIREQAENIIHLFTLTNLGAPRAFKYFDTTIARKEYKSTKEVLDATLIHQSITGLYETRIDLSQLGGDEGADKRTADGSEFESPKKKRKV

SEQ ID NO: 450 - protein, 1567 aa, synthetic construct
SEVEFSHEYWMRHALTLAKRARDEREVPVGAVLVHNNRVIGEGWNRAIGLHDPTAHAEIMALRQGGLVMQNYRLYDATLYTTFEPCVMCAGAMIHSRIGRVVFGVRNAKTGAAGSLMDVLHYPGMNHRVEITEGILADECAALLCTFFRMPRSVFKAQKKAQSSTDKGPKPKKEESEKDKKYSIGLAIGTNSVGWAVITDEYKVPSKKFKVLGNTDRHSIKKNLIGALLFDSGETAEATRLKRTARRRYTRRKNRICYLQEIFSNEMAKVDDSFFHRLEESFLVEEDKKHERHPIFGNIVDEVAYHEKYPTIYHLRKKLVDSTDKADLRLIYLALAHMIKFRGHFLIEGDLNPDNSDVDKLFIQLVQTYNQLFEENPINASGVDAKAILSARLSKSRRLENLIAQLPGEKKNGLFGNLIALSLGLTPNFKSNFDLAEDAKLQLSKDTYDDDLDNLLAQIGDQYADLFLAAKNLSDAILLSDILRVNTEITKAPLSASMVKRYDEHHQDLTLLKALVRQQLPEKYKEIFFDQSKNGYAGYIDGGASQEEFYKFIKPILEKMDGTEELLVKLNREDLLRKQRTFDNGIIPHQIHLGELHAILRRQGDFYPFLKDNREKIEKILTFRIPYYVGPLARGNSRFAWMTRKSEETITPWNFEEVVDKGASAQSFIERMTNFDKNLPNEKVLPKHSLLYEYFTVYNELTKVKYVTEGMRKPAFLSGEQKKAIVDLLFKTNRKVTVKQLKEDYFKKIECFDSVEISGVEDRFNASLGTYHDLLKIIKDKDFLDNEENEDILEDIVLTLTLFEDREMIEERLKTYAHLFDDKVMKQLKRLRYTGWGRLSRKLINGIRDKQSGKTILDFLKSDGFANRNFMQLIHDDSLTFKEDIQKAQVSGQGDSLHEHIANLAGSPAIKKGILQTVKVVDELVKVMGGHKPENIVIEMARENQTTQKGQKNSRERMKRIEEGIKELGSQILKEHPVENTQLQNEKLYLYYLQNGRDMYVDQELDINRLSDYDVDHIVPQSFLKDDSIDNKVLTRSDKNRGKSDNVPSEEVVKKMKNYWRQLLNAKLITQRKFDNLTKAERGGLSELDKAGFIKRQLVETRQITKHVAQILDSRMNTKYDENDKLIREVKVITLKSKLVSDFRKDFQFYKVREINNYHHAHDAYLNAVVGTALIKKYPKLESEFVYGDYKVYDVRKMIAKSEQEIGKATAKYFFYSNIMNFFKTEITLANGEIRKRPLIETNGETGEIVWDKGRDFATVRKVLSMPQVNIVKKTEVQTGGFSKESILPKGNSDKLIARKKDWDPKKYGGFMYPTVAYSVLVVAKVEKGKSKKLKSVKELLGITIMERSSFEKNPIDFLEAKGYKEVKKDLIIKLPKYSLFELENGRKRMLASAKFLQKGNELALPSKYVNFLYLASHYEKLKGSPKDNEQKQLFVEQHKHYLDEIIEQISEFSKRVILDDANLDKVLSAYNKHRDKPIREQAENIIHLFTLTNLGAPRAFKYFDTTIARKEYRSTKEVLDATLIHQSITGLYETRIDLSQLGGDEGADKRTADGSEFESPKKKRKV

SEQ ID NO: 451 - DNA, 4761 bp, synthetic construct
  source 1..4761: mol_type = other DNA
tcagaagtcgagtttagccacgaatattggatgcgccacgccctcaccctggccaagagagcccgggacgagcgcgaggtgcccgtgggcgccgtcctggtgcacaacaacagggtgatcggcgagggctggaaccgggccatcggcctgcacgaccccacagcccacgccgagatcatggccctgcggcagggtggcctggtcatgcagaactacaggctgtatgacgccaccctgtacaccacattcgagccctgcgtgatgtgcgccggggccatgatccacagccggatcggccgcgtggtgttcggcgtgcggaacgccaagaccggcgccgccggcagcctgatggacgttctgcactaccccgggatgaaccacagggtggagatcacagagggcatcctggcagacgagtgcgccgccctgctgtgcactttcttcaggatgcccagatctgtgttcaaggcccagaagaaggcccagagctccaccgacagcggcgggagctctgggggctcctccgggagcgagacccccgggaccagcgagtccgccacccccgagagcagcggcggcagctccggggggagcgacaagaagtactccatcggcctggccatcggcaccaactccgtgggttgggccgtgatcaccgatgagtacaaggtgcccagcaagaagttcaaggtgctgggcaacaccgacaggcactctatcaagaagaacctgatcggcgccctgctgttcgacagcggggagaccgctgaggccactcggctgaagagaaccgccaggcgcagatacacccggagaaagaaccggatctgctacctgcaggagatcttcagcaacgagatggccaaggtggacgacagcttcttccacaggctggaggagagcttcctggtggaggaggacaagaagcacgagcgccaccccatcttcggcaacatcgtggatgaggtggcctaccacgagaagtaccccaccatctaccacctgcggaagaagctggtggacagcaccgataaggccgatctgcggctgatctacctggccctggcccacatgatcaagttcagggggcacttcctgatcgagggcgacctgaaccccgacaactccgatgtggataaactgttcatccagctggtgcagacctacaaccagctgtttgaggagaatcccatcaacgcctccggcgtggacgccaaggccatcctgagcgcccggctgtccaagagccggaggctggagaatctgatcgcccagctgcctggcgagaagaagaacggcctgttcggcaacctgatcgccctgagcctgggcctgacccccaatttcaagagcaacttcgacctggccgaggatgctaagctgcagctgtccaaggacacctacgacgatgacctggacaacctgctggctcagatcggcgatcagtacgccgacctgttcctggccgccaagaacctgtcagacgccatcctgctgtctgacattctgcgggtgaacaccgagatcaccaaggccccactgtccgcctctatggtgaagaggtacgatgagcaccaccaggacctgaccctgctgaaggctctggtgcggcagcagctgccggagaagtacaaggagatcttcttcgaccagagcaagaacggctacgccggctacatcgacggcggggccagccaggaggagttctacaagttcatcaagcctatcctggagaagatggacggcaccgaggagctgctggtgaagctgaaccgggaggacctgctgcggaagcagaggaccttcgacaacggcatcattccccaccagatccacctgggcgagctgcacgccatcctgcggaggcagggcgacttctaccctttcctgaaggacaacagggagaagatcgagaagatcctgaccttcaggatcccctactacgtgggccccctggcccgcggcaactcccgctttgcctggatgaccagaaagagcgaggagaccatcaccccttggaacttcgaggaggtggtggacaagggcgccagcgcccagagcttcatcgagcgcatgaccaacttcgacaagaatctgcccaacgagaaggtgctgcccaagcactccctgctgtacgagtacttcaccgtgtacaacgagctgacaaaggtgaagtacgtgacagagggcatgcgcaagcccgccttcctgtctggcgagcagaagaaggccatcgtggacctgctgttcaagaccaacaggaaggtgaccgtgaagcagctgaaggaggactacttcaagaagatcgagtgcttcgacagcgtggagatcagcggcgtggaggacaggttcaacgccagcctgggcacctaccacgacctgctgaagatcatcaaggacaaggacttcctggataacgaggagaacgaggatatcctggaggacattgtcctgaccctgaccctgttcgaggatcgggagatgatcgaggagcgcctcaagacctacgcccacctgttcgacgataaggtgatgaagcagctgaagcggctgcgctacaccggctggggccgcctgtcccggaagctgatcaacggcatccgggacaagcagtccggcaagaccatcctggacttcctgaagtccgatggttttgccaacagaaacttcatgcagctgatccacgacgacagcctgaccttcaaggaggacatccagaaggctcaggtgtccggacagggggactccctgcacgagcacatcgccaacctggccggctctcccgccatcaagaagggcatcctgcagaccgtgaaggtggtggacgagctggtgaaggtgatgggcgggcacaagcccgagaacatcgtgatcgagatggcccgggagaaccagaccacccagaagggccagaagaacagcagggagcgcatgaagcgcatcgaggagggcatcaaggagctgggtagccagatcctgaaggagcaccctgtggagaatacccagctgcagaacgagaagctgtatctgtactacctgcagaacggcagggacatgtacgtggatcaggagctggacatcaaccggctgtctgactacgacgtggaccacatcgtgccccagtctttcctgaaggacgacagcatcgacaacaaggtgctgacccgcagcgacaagaacaggggcaagagcgataacgtgccctccgaggaggtggtcaagaagatgaagaactactggcggcagctgctgaacgccaagctgatcacccagcggaagttcgacaacctgaccaaggccgagagaggcggcctgtccgagctggacaaggccggcttcatcaagcggcagctggtggagacccggcagatcaccaagcacgtcgcccagatcctggactccaggatgaacaccaagtacgacgagaacgacaagctgatcagagaggtgaaggtgatcaccctgaagtccaagctggtgagcgacttcaggaaggatttccagttctacaaggtgcgggagatcaacaactatcaccacgcccacgacgcctacctgaacgccgtcgtgggcaccgctctgatcaagaagtatcctaagctggagagcgagttcgtgtacggcgactacaaggtgtacgacgtgcggaagatgatcgccaagagcgagcaggagatcggcaaggccaccgccaagtacttcttctactccaatatcatgaacttcttcaagaccgagatcaccctggccaacggggagatccggaagcgcccactgatcgagaccaacggcgagaccggcgagatcgtgtgggacaagggcagggacttcgccaccgtgaggaaggtgctgtccatgccccaggtgaacatcgtgaaaaagaccgaggtgcagaccggggggttctccaaggagagcatcctgcccaagggcaacagcgacaagctgatcgcccggaagaaggactgggaccccaagaagtacggaggcttcatgcagcctaccgtggcctactccgtgctggtggtggccaaggtggagaagggcaagtccaagaagctgaagtcagtgaaggagctgctgggcatcaccatcatggagcggtctagcttcgagaagaatcctattgacttcctggaggccaagggctacaaggaggtcaagaaggatctgatcatcaagctgcccaagtacagcctgttcgagctggagaatggccggaagaggatgctggccagcgccaagttcctgcagaagggcaacgagctggccctgcccagcaagtacgtgaacttcctctatctggccagccactacgagaagctgaagggctctccagaggacaacgagcagaagcagctgttcgtggagcagcacaagcactacctggacgagatcatcgagcagatctccgagttcagcaagcgcgtgatcctggccgacgccaacctggacaaggtgctgtccgcttacaacaagcacagggacaagcccatcagggagcaggccgagaacatcatccacctgttcaccctgaccaacctgggcgcccccagggccttcaagtacttcgataccaccatcgccaggaaggagtacaaaagtactaaggaggtcctggatgccactctgatccaccagagcatcaccgggctgtacgagacccggatcgacctgtcccagctgggcggcgacgagggcgccgacaagcggacagccgacggcagcgagttcgagagccccaagaagaagcggaaggtg

SEQ ID NO: 452 - DNA, 4761 bp, synthetic construct
  source 1..4761: mol_type = other DNA
tcagaagtcgagtttagccacgaatattggatgcgccacgccctcaccctggccaagagagcccgggacgagcgcgaggtgcccgtgggcgccgtcctggtgcacaacaacagggtgatcggcgagggctggaaccgggccatcggcctgcacgaccccacagcccacgccgagatcatggccctgcggcagggtggcctggtcatgcagaactacaggctgtatgacgccaccctgtacaccacattcgagccctgcgtgatgtgcgccggggccatgatccacagccggatcggccgcgtggtgttcggcgtgcggaacgccaagaccggcgccgccggcagcctgatggacgttctgcactaccccgggatgaaccacagggtggagatcacagagggcatcctggcagacgagtgcgccgccctgctgtgcactttcttcaggatgcccagatctgtgttcaaggcccagaagaaggcccagagctccaccgacagcggcgggagctctgggggctcctccgggagcgagacccccgggaccagcgagtccgccacccccgagagcagcggcggcagctccggggggagcgacaagaagtactccatcggcctggccatcggcaccaactccgtgggttgggccgtgatcaccgatgagtacaaggtgcccagcaagaagttcaaggtgctgggcaacaccgacaggcactctatcaagaagaacctgatcggcgccctgctgttcgacagcggggagaccgctgaggccactcggctgaagagaaccgccaggcgcagatacacccggagaaagaaccggatctgctacctgcaggagatcttcagcaacgagatggccaaggtggacgacagcttcttccacaggctggaggagagcttcctggtggaggaggacaagaagcacgagcgccaccccatcttcggcaacatcgtggatgaggtggcctaccacgagaagtaccccaccatctaccacctgcggaagaagctggtggacagcaccgataaggccgatctgcggctgatctacctggccctggcccacatgatcaagttcagggggcacttcctgatcgagggcgacctgaaccccgacaactccgatgtggataaactgttcatccagctggtgcagacctacaaccagctgtttgaggagaatcccatcaacgcctccggcgtggacgccaaggccatcctgagcgcccggctgtccaagagccggaggctggagaatctgatcgcccagctgcctggcgagaagaagaacggcctgttcggcaacctgatcgccctgagcctgggcctgacccccaatttcaagagcaacttcgacctggccgaggatgctaagctgcagctgtccaaggacacctacgacgatgacctggacaacctgctggctcagatcggcgatcagtacgccgacctgttcctggccgccaagaacctgtcagacgccatcctgctgtctgacattctgcgggtgaacaccgagatcaccaaggccccactgtccgcctctatggtgaagaggtacgatgagcaccaccaggacctgaccctgctgaaggctctggtgcggcagcagctgccggagaagtacaaggagatcttcttcgaccagagcaagaacggctacgccggctacatcgacggcggggccagccaggaggagttctacaagttcatcaagcctatcctggagaagatggacggcaccgaggagctgctggtgaagctgaaccgggaggacctgctgcggaagcagaggaccttcgacaacggcatcattccccaccagatccacctgggcgagctgcacgccatcctgcggaggcagggcgacttctaccctttcctgaaggacaacagggagaagatcgagaagatcctgaccttcaggatcccctactacgtgggccccctggcccgcggcaactcccgctttgcctggatgaccagaaagagcgaggagaccatcaccccttggaacttcgaggaggtggtggacaagggcgccagcgcccagagcttcatcgagcgcatgaccaacttcgacaagaatctgcccaacgagaaggtgctgcccaagcactccctgctgtacgagtacttcaccgtgtacaacgagctgacaaaggtgaagtacgtgacagagggcatgcgcaagcccgccttcctgtctggcgagcagaagaaggccatcgtggacctgctgttcaagaccaacaggaaggtgaccgtgaagcagctgaaggaggactacttcaagaagatcgagtgcttcgacagcgtggagatcagcggcgtggaggacaggttcaacgccagcctgggcacctaccacgacctgctgaagatcatcaaggacaaggacttcctggataacgaggagaacgaggatatcctggaggacattgtcctgaccctgaccctgttcgaggatcgggagatgatcgaggagcgcctcaagacctacgcccacctgttcgacgataaggtgatgaagcagctgaagcggctgcgctacaccggctggggccgcctgtcccggaagctgatcaacggcatccgggacaagcagtccggcaagaccatcctggacttcctgaagtccgatggttttgccaacagaaacttcatgcagctgatccacgacgacagcctgaccttcaaggaggacatccagaaggctcaggtgtccggacagggggactccctgcacgagcacatcgccaacctggccggctctcccgccatcaagaagggcatcctgcagaccgtgaaggtggtggacgagctggtgaaggtgatgggcgggcacaagcccgagaacatcgtgatcgagatggcccgggagaaccagaccacccagaagggccagaagaacagcagggagcgcatgaagcgcatcgaggagggcatcaaggagctgggtagccagatcctgaaggagcaccctgtggagaatacccagctgcagaacgagaagctgtatctgtactacctgcagaacggcagggacatgtacgtggatcaggagctggacatcaaccggctgtctgactacgacgtggaccacatcgtgccccagtctttcctgaaggacgacagcatcgacaacaaggtgctgacccgcagcgacaagaacaggggcaagagcgataacgtgccctccgaggaggtggtcaagaagatgaagaactactggcggcagctgctgaacgccaagctgatcacccagcggaagttcgacaacctgaccaaggccgagagaggcggcctgtccgagctggacaaggccggcttcatcaagcggcagctggtggagacccggcagatcaccaagcacgtcgcccagatcctggactccaggatgaacaccaagtacgacgagaacgacaagctgatcagagaggtgaaggtgatcaccctgaagtccaagctggtgagcgacttcaggaaggatttccagttctacaaggtgcgggagatcaacaactatcaccacgcccacgacgcctacctgaacgccgtcgtgggcaccgctctgatcaagaagtatcctaagctggagagcgagttcgtgtacggcgactacaaggtgtacgacgtgcggaagatgatcgccaagagcgagcaggagatcggcaaggccaccgccaagtacttcttctactccaatatcatgaacttcttcaagaccgagatcaccctggccaacggggagatccggaagcgcccactgatcgagaccaacggcgagaccggcgagatcgtgtgggacaagggcagggacttcgccaccgtgaggaaggtgctgtccatgccccaggtgaacatcgtgaaaaagaccgaggtgcagaccggggggttctccaaggagagcatcctgcccaagggcaacagcgacaagctgatcgcccggaagaaggactgggaccccaagaagtacggaggcttcatgtatcctaccgtggcctactccgtgctggtggtggccaaggtggagaagggcaagtccaagaagctgaagtcagtgaaggagctgctgggcatcaccatcatggagcggtctagcttcgagaagaatcctattgacttcctggaggccaagggctacaaggaggtcaagaaggatctgatcatcaagctgcccaagtacagcctgttcgagctggagaatggccggaagaggatgctggccagcgccaagttcctgcagaagggcaacgagctggccctgcccagcaagtacgtgaacttcctctatctggccagccactacgagaagctgaagggctctccagaggacaacgagcagaagcagctgttcgtggagcagcacaagcactacctggacgagatcatcgagcagatctccgagttcagcaagcgcgtgatcctggccgacgccaacctggacaaggtgctgtccgcttacaacaagcacagggacaagcccatcagggagcaggccgagaacatcatccacctgttcaccctgaccaacctgggcgcccccagggccttcaagtacttcgataccaccatcgccaggaaggagtacaaaagtactaaggaggtcctggatgccactctgatccaccagagcatcaccgggctgtacgagacccggatcgacctgtcccagctgggcggcgacgagggcgccgacaagcggacagccgacggcagcgagttcgagagccccaagaagaagcggaaggtg

SEQ ID NO: 453 - DNA, 4701 bp, synthetic construct
  source 1..4701: mol_type = other DNA
tcagaagtcgagtttagccacgaatattggatgcgccacgccctcaccctggccaagagagcccgggacgagcgcgaggtgcccgtgggcgccgtcctggtgcacaacaacagggtgatcggcgagggctggaaccgggccatcggcctgcacgaccccacagcccacgccgagatcatggccctgcggcagggtggcctggtcatgcagaactacaggctgtatgacgccaccctgtacaccacattcgagccctgcgtgatgtgcgccggggccatgatccacagccggatcggccgcgtggtgttcggcgtgcggaacgccaagaccggcgccgccggcagcctgatggacgttctgcactaccccgggatgaaccacagggtggagatcacagagggcatcctggcagacgagtgcgccgccctgctgtgcactttcttcaggatgcccagatctgtgttcaaggcccagaagaaggcccagagctccaccgacgagggcggatctgaggaagaggaagagagcggcagcgacaagaagtactccatcggcctggccatcggcaccaactccgtgggttgggccgtgatcaccgatgagtacaaggtgcccagcaagaagttcaaggtgctgggcaacaccgacaggcactctatcaagaagaacctgatcggcgccctgctgttcgacagcggggagaccgctgaggccactcggctgaagagaaccgccaggcgcagatacacccggagaaagaaccggatctgctacctgcaggagatcttcagcaacgagatggccaaggtggacgacagcttcttccacaggctggaggagagcttcctggtggaggaggacaagaagcacgagcgccaccccatcttcggcaacatcgtggatgaggtggcctaccacgagaagtaccccaccatctaccacctgcggaagaagctggtggacagcaccgataaggccgatctgcggctgatctacctggccctggcccacatgatcaagttcagggggcacttcctgatcgagggcgacctgaaccccgacaactccgatgtggataaactgttcatccagctggtgcagacctacaaccagctgtttgaggagaatcccatcaacgcctccggcgtggacgccaaggccatcctgagcgcccggctgtccaagagccggaggctggagaatctgatcgcccagctgcctggcgagaagaagaacggcctgttcggcaacctgatcgccctgagcctgggcctgacccccaatttcaagagcaacttcgacctggccgaggatgctaagctgcagctgtccaaggacacctacgacgatgacctggacaacctgctggctcagatcggcgatcagtacgccgacctgttcctggccgccaagaacctgtcagacgccatcctgctgtctgacattctgcgggtgaacaccgagatcaccaaggccccactgtccgcctctatggtgaagaggtacgatgagcaccaccaggacctgaccctgctgaaggctctggtgcggcagcagctgccggagaagtacaaggagatcttcttcgaccagagcaagaacggctacgccggctacatcgacggcggggccagccaggaggagttctacaagttcatcaagcctatcctggagaagatggacggcaccgaggagctgctggtgaagctgaaccgggaggacctgctgcggaagcagaggaccttcgacaacggcatcattccccaccagatccacctgggcgagctgcacgccatcctgcggaggcagggcgacttctaccctttcctgaaggacaacagggagaagatcgagaagatcctgaccttcaggatcccctactacgtgggccccctggcccgcggcaactcccgctttgcctggatgaccagaaagagcgaggagaccatcaccccttggaacttcgaggaggtggtggacaagggcgccagcgcccagagcttcatcgagcgcatgaccaacttcgacaagaatctgcccaacgagaaggtgctgcccaagcactccctgctgtacgagtacttcaccgtgtacaacgagctgacaaaggtgaagtacgtgacagagggcatgcgcaagcccgccttcctgtctggcgagcagaagaaggccatcgtggacctgctgttcaagaccaacaggaaggtgaccgtgaagcagctgaaggaggactacttcaagaagatcgagtgcttcgacagcgtggagatcagcggcgtggaggacaggttcaacgccagcctgggcacctaccacgacctgctgaagatcatcaaggacaaggacttcctggataacgaggagaacgaggatatcctggaggacattgtcctgaccctgaccctgttcgaggatcgggagatgatcgaggagcgcctcaagacctacgcccacctgttcgacgataaggtgatgaagcagctgaagcggctgcgctacaccggctggggccgcctgtcccggaagctgatcaacggcatccgggacaagcagtccggcaagaccatcctggacttcctgaagtccgatggttttgccaacagaaacttcatgcagctgatccacgacgacagcctgaccttcaaggaggacatccagaaggctcaggtgtccggacagggggactccctgcacgagcacatcgccaacctggccggctctcccgccatcaagaagggcatcctgcagaccgtgaaggtggtggacgagctggtgaaggtgatgggcgggcacaagcccgagaacatcgtgatcgagatggcccgggagaaccagaccacccagaagggccagaagaacagcagggagcgcatgaagcgcatcgaggagggcatcaaggagctgggtagccagatcctgaaggagcaccctgtggagaatacccagctgcagaacgagaagctgtatctgtactacctgcagaacggcagggacatgtacgtggatcaggagctggacatcaaccggctgtctgactacgacgtggaccacatcgtgccccagtctttcctgaaggacgacagcatcgacaacaaggtgctgacccgcagcgacaagaacaggggcaagagcgataacgtgccctccgaggaggtggtcaagaagatgaagaactactggcggcagctgctgaacgccaagctgatcacccagcggaagttcgacaacctgaccaaggccgagagaggcggcctgtccgagctggacaaggccggcttcatcaagcggcagctggtggagacccggcagatcaccaagcacgtcgcccagatcctggactccaggatgaacaccaagtacgacgagaacgacaagctgatcagagaggtgaaggtgatcaccctgaagtccaagctggtgagcgacttcaggaaggatttccagttctacaaggtgcgggagatcaacaactatcaccacgcccacgacgcctacctgaacgccgtcgtgggcaccgctctgatcaagaagtatcctaagctggagagcgagttcgtgtacggcgactacaaggtgtacgacgtgcggaagatgatcgccaagagcgagcaggagatcggcaaggccaccgccaagtacttcttctactccaatatcatgaacttcttcaagaccgagatcaccctggccaacggggagatccggaagcgcccactgatcgagaccaacggcgagaccggcgagatcgtgtgggacaagggcagggacttcgccaccgtgaggaaggtgctgtccatgccccaggtgaacatcgtgaaaaagaccgaggtgcagaccggggggttctccaaggagagcatcctgcccaagggcaacagcgacaagctgatcgcccggaagaaggactgggaccccaagaagtacggaggcttcttgtatcctaccgtggcctactccgtgctggtggtggccaaggtggagaagggcaagtccaagaagctgaagtcagtgaaggagctgctgggcatcaccatcatggagcggtctagcttcgagaagaatcctattgacttcctggaggccaagggctacaaggaggtcaagaaggatctgatcatcaagctgcccaagtacagcctgttcgagctggagaatggccggaagaggatgctggccagcgccaagttcctgcagaagggcaacgagctggccctgcccagcaagtacgtgaacttcctctatctggccagccactacgagaagctgaagggctctccagaggacaacgagcagaagcagctgttcgtggagcagcacaagcactacctggacgagatcatcgagcagatctccgagttcagcaagcgcgtgatcctggccgacgccaacctggacaaggtgctgtccgcttacaacaagcacagggacaagcccatcagggagcaggccgagaacatcatccacctgttcaccctgaccaacctgggcgcccccagggccttcaagtacttcgataccaccatcgccaggaaggagtacaaaagtactaaggaggtcctggatgccactctgatccaccagagcatcaccgggctgtacgagacccggatcgacctgtcccagctgggcggcgacgagggcgccgacaagcggacagccgacggcagcgagttcgagagccccaagaagaagcggaaggtg

SEQ ID NO: 454 - DNA, 4701 bp, synthetic construct
  source 1..4701: mol_type = other DNA
tcagaagtcgagtttagccacgaatattggatgcgccacgccctcaccctggccaagagagcccgggacgagcgcgaggtgcccgtgggcgccgtcctggtgcacaacaacagggtgatcggcgagggctggaaccgggccatcggcctgcacgaccccacagcccacgccgagatcatggccctgcggcagggtggcctggtcatgcagaactacaggctgtatgacgccaccctgtacaccacattcgagccctgcgtgatgtgcgccggggccatgatccacagccggatcggccgcgtggtgttcggcgtgcggaacgccaagaccggcgccgccggcagcctgatggacgttctgcactaccccgggatgaaccacagggtggagatcacagagggcatcctggcagacgagtgcgccgccctgctgtgcactttcttcaggatgcccagatctgtgttcaaggcccagaagaaggcccagagctccaccgacgagggcggatctgaggaagaggaagagagcggcagcgacaagaagtactccatcggcctggccatcggcaccaactccgtgggttgggccgtgatcaccgatgagtacaaggtgcccagcaagaagttcaaggtgctgggcaacaccgacaggcactctatcaagaagaacctgatcggcgccctgctgttcgacagcggggagaccgctgaggccactcggctgaagagaaccgccaggcgcagatacacccggagaaagaaccggatctgctacctgcaggagatcttcagcaacgagatggccaaggtggacgacagcttcttccacaggctggaggagagcttcctggtggaggaggacaagaagcacgagcgccaccccatcttcggcaacatcgtggatgaggtggcctaccacgagaagtaccccaccatctaccacctgcggaagaagctggtggacagcaccgataaggccgatctgcggctgatctacctggccctggcccacatgatcaagttcagggggcacttcctgatcgagggcgacctgaaccccgacaactccgatgtggataaactgttcatccagctggtgcagacctacaaccagctgtttgaggagaatcccatcaacgcctccggcgtggacgccaaggccatcctgagcgcccggctgtccaagagccggaggctggagaatctgatcgcccagctgcctggcgagaagaagaacggcctgttcggcaacctgatcgccctgagcctgggcctgacccccaatttcaagagcaacttcgacctggccgaggatgctaagctgcagctgtccaaggacacctacgacgatgacctggacaacctgctggctcagatcggcgatcagtacgccgacctgttcctggccgccaagaacctgtcagacgccatcctgctgtctgacattctgcgggtgaacaccgagatcaccaaggccccactgtccgcctctatggtgaagaggtacgatgagcaccaccaggacctgaccctgctgaaggctctggtgcggcagcagctgccggagaagtacaaggagatcttcttcgaccagagcaagaacggctacgccggctacatcgacggcggggccagccaggaggagttctacaagttcatcaagcctatcctggagaagatggacggcaccgaggagctgctggtgaagctgaaccgggaggacctgctgcggaagcagaggaccttcgacaacggcatcattccccaccagatccacctgggcgagctgcacgccatcctgcggaggcagggcgacttctaccctttcctgaaggacaacagggagaagatcgagaagatcctgaccttcaggatcccctactacgtgggccccctggcccgcggcaactcccgctttgcctggatgaccagaaagagcgaggagaccatcaccccttggaacttcgaggaggtggtggacaagggcgccagcgcccagagcttcatcgagcgcatgaccaacttcgacaagaatctgcccaacgagaaggtgctgcccaagcactccctgctgtacgagtacttcaccgtgtacaacgagctgacaaaggtgaagtacgtgacagagggcatgcgcaagcccgccttcctgtctggcgagcagaagaaggccatcgtggacctgctgttcaagaccaacaggaaggtgaccgtgaagcagctgaaggaggactacttcaagaagatcgagtgcttcgacagcgtggagatcagcggcgtggaggacaggttcaacgccagcctgggcacctaccacgacctgctgaagatcatcaaggacaaggacttcctggataacgaggagaacgaggatatcctggaggacattgtcctgaccctgaccctgttcgaggatcgggagatgatcgaggagcgcctcaagacctacgcccacctgttcgacgataaggtgatgaagcagctgaagcggctgcgctacaccggctggggccgcctgtcccggaagctgatcaacggcatccgggacaagcagtccggcaagaccatcctggacttcctgaagtccgatggttttgccaacagaaacttcatgcagctgatccacgacgacagcctgaccttcaaggaggacatccagaaggctcaggtgtccggacagggggactccctgcacgagcacatcgccaacctggccggctctcccgccatcaagaagggcatcctgcagaccgtgaaggtggtggacgagctggtgaaggtgatgggcgggcacaagcccgagaacatcgtgatcgagatggcccgggagaaccagaccacccagaagggccagaagaacagcagggagcgcatgaagcgcatcgaggagggcatcaaggagctgggtagccagatcctgaaggagcaccctgtggagaatacccagctgcagaacgagaagctgtatctgtactacctgcagaacggcagggacatgtacgtggatcaggagctggacatcaaccggctgtctgactacgacgtggaccacatcgtgccccagtctttcctgaaggacgacagcatcgacaacaaggtgctgacccgcagcgacaagaacaggggcaagagcgataacgtgccctccgaggaggtggtcaagaagatgaagaactactggcggcagctgctgaacgccaagctgatcacccagcggaagttcgacaacctgaccaaggccgagagaggcggcctgtccgagctggacaaggccggcttcatcaagcggcagctggtggagacccggcagatcaccaagcacgtcgcccagatcctggactccaggatgaacaccaagtacgacgagaacgacaagctgatcagagaggtgaaggtgatcaccctgaagtccaagctggtgagcgacttcaggaaggatttccagttctacaaggtgcgggagatcaacaactatcaccacgcccacgacgcctacctgaacgccgtcgtgggcaccgctctgatcaagaagtatcctaagctggagagcgagttcgtgtacggcgactacaaggtgtacgacgtgcggaagatgatcgccaagagcgagcaggagatcggcaaggccaccgccaagtacttcttctactccaatatcatgaacttcttcaagaccgagatcaccctggccaacggggagatccggaagcgcccactgatcgagaccaacggcgagaccggcgagatcgtgtgggacaagggcagggacttcgccaccgtgaggaaggtgctgtccatgccccaggtgaacatcgtgaaaaagaccgaggtgcagaccggggggttctccaaggagagcatcctgcccaagggcaacagcgacaagctgatcgcccggaagaaggactgggaccccaagaagtacggaggcttcatgtatcctaccgtggcctactccgtgctggtggtggccaaggtggagaagggcaagtccaagaagctgaagtcagtgaaggagctgctgggcatcaccatcatggagcggtctagcttcgagaagaatcctattgacttcctggaggccaagggctacaaggaggtcaagaaggatctgatcatcaagctgcccaagtacagcctgttcgagctggagaatggccggaagaggatgctggccagcgccaagttcctgcagaagggcaacgagctggccctgcccagcaagtacgtgaacttcctctatctggccagccactacgagaagctgaagggctctccagaggacaacgagcagaagcagctgttcgtggagcagcacaagcactacctggacgagatcatcgagcagatctccgagttcagcaagcgcgtgatcctggccgacgccaacctggacaaggtgctgtccgcttacaacaagcacagggacaagcccatcagggagcaggccgagaacatcatccacctgttcaccctgaccaacctgggcgcccccagggccttcaagtacttcgataccaccatcgccaggaaggagtacaaaagtactaaggaggtcctggatgccactctgatccaccagagcatcaccgggctgtacgagacccggatcgacctgtcccagctgggcggcgacgagggcgccgacaagcggacagccgacggcagcgagttcgagagccccaagaagaagcggaaggtg

SEQ ID NO: 455 - DNA, 4701 bp, synthetic construct
  source 1..4701: mol_type = other DNA
tcagaagtcgagtttagccacgaatattggatgcgccacgccctcaccctggccaagagagcccgggacgagcgcgaggtgcccgtgggcgccgtcctggtgcacaacaacagggtgatcggcgagggctggaaccgggccatcggcctgcacgaccccacagcccacgccgagatcatggccctgcggcagggtggcctggtcatgcagaactacaggctgtatgacgccaccctgtacaccacattcgagccctgcgtgatgtgcgccggggccatgatccacagccggatcggccgcgtggtgttcggcgtgcggaacgccaagaccggcgccgccggcagcctgatggacgttctgcactaccccgggatgaaccacagggtggagatcacagagggcatcctggcagacgagtgcgccgccctgctgtgcactttcttcaggatgcccagatctgtgttcaaggcccagaagaaggcccagagctccaccgacaaaggccctaagcccaagaaggaagagagcgagaaggacaagaagtactccatcggcctggccatcggcaccaactccgtgggttgggccgtgatcaccgatgagtacaaggtgcccagcaagaagttcaaggtgctgggcaacaccgacaggcactctatcaagaagaacctgatcggcgccctgctgttcgacagcggggagaccgctgaggccactcggctgaagagaaccgccaggcgcagatacacccggagaaagaaccggatctgctacctacaggagatcttcagcaacgagatggccaaggtggacgacagcttcttccacaggctggaggagagcttcctggtggaggaggacaagaagcacgagcgccaccccatcttcggcaacatcgtggatgaggtggcctaccacgagaagtaccccaccatctaccacctgcggaagaagctggtggacagcaccgataaggccgatctgcggctgatctacctggccctggcccacatgatcaagttcagggggcacttcctgatcgagggcgacctgaaccccgacaactccgatgtggataaactgttcatccagctggtgcagacctacaaccagctgtttgaggagaatcccatcaacgcctccggcgtggacgccaaggccatcctgagcgcccggctgtccaagagccggaggctggagaatctgatcgcccagctgcctggcgagaagaagaacggcctgttcggcaacctgatcgccctgagcctgggcctgacccccaatttcaagagcaacttcgacctggccgaggatgctaagctgcagctgtccaaggacacctacgacgatgacctggacaacctgctggctcagatcggcgatcagtacgccgacctgttcctggccgccaagaacctgtcagacgccatcctgctgtctgacattctgcgggtgaacaccgagatcaccaaggccccactgtccgcctctatggtgaagaggtacgatgagcaccaccaggacctgaccctgctgaaggctctggtgcggcagcagctgccggagaagtacaaggagatcttcttcgaccagagcaagaacggctacgccggctacatcgacggcggggccagccaggaggagttctacaagttcatcaagcctatcctggagaagatggacggcaccgaggagctgctggtgaagctgaaccgggaggacctgctgcggaagcagaggaccttcgacaacggcatcattccccaccagatccacctgggcgagctgcacgccatcctgcggaggcagggcgacttctaccctttcctgaaggacaacagggagaagatcgagaagatcctgaccttcaggatcccctactacgtgggccccctggcccgcggcaactcccgctttgcctggatgaccagaaagagcgaggagaccatcaccccttggaacttcgaggaggtggtggacaagggcgccagcgcccagagcttcatcgagcgcatgaccaacttcgacaagaatctgcccaacgagaaggtgctgcccaagcactccctgctgtacgagtacttcaccgtgtacaacgagctgacaaaggtgaagtacgtgacagagggcatgcgcaagcccgccttcctgtctggcgagcagaagaaggccatcgtggacctgctgttcaagaccaacaggaaggtgaccgtgaagcagctgaaggaggactacttcaagaagatcgagtgcttcgacagcgtggagatcagcggcgtggaggacaggttcaacgccagcctgggcacctaccacgacctgctgaagatcatcaaggacaaggacttcctggataacgaggagaacgaggatatcctggaggacattgtcctgaccctgaccctgttcgaggatcgggagatgatcgaggagcgcctcaagacctacgcccacctgttcgacgataaggtgatgaagcagctgaagcggctgcgctacaccggctggggccgcctgtcccggaagctgatcaacggcatccgggacaagcagtccggcaagaccatcctggacttcctgaagtccgatggttttgccaacagaaacttcatgcagctgatccacgacgacagcctgaccttcaaggaggacatccagaaggctcaggtgtccggacagggggactccctgcacgagcacatcgccaacctggccggctctcccgccatcaagaagggcatcctgcagaccgtgaaggtggtggacgagctggtgaaggtgatgggcgggcacaagcccgagaacatcgtgatcgagatggcccgggagaaccagaccacccagaagggccagaagaacagcagggagcgcatgaagcgcatcgaggagggcatcaaggagctgggtagccagatcctgaaggagcaccctgtggagaatacccagctgcagaacgagaagctgtatctgtactacctgcagaacggcagggacatgtacgtggatcaggagctggacatcaaccggctgtctgactacgacgtggaccacatcgtgccccagtctttcctgaaggacgacagcatcgacaacaaggtgctgacccgcagcgacaagaacaggggcaagagcgataacgtgccctccgaggaggtggtcaagaagatgaagaactactggcggcagctgctgaacgccaagctgatcacccagcggaagttcgacaacctgaccaaggccgagagaggcggcctgtccgagctggacaaggccggcttcatcaagcggcagctggtggagacccggcagatcaccaagcacgtcgcccagatcctggactccaggatgaacaccaagtacgacgagaacgacaagctgatcagagaggtgaaggtgatcaccctgaagtccaagctggtgagcgacttcaggaaggatttccagttctacaaggtgcgggagatcaacaactatcaccacgcccacgacgcctacctgaacgccgtcgtgggcaccgctctgatcaagaagtatcctaagctggagagcgagttcgtgtacggcgactacaaggtgtacgacgtgcggaagatgatcgccaagagcgagcaggagatcggcaaggccaccgccaagtacttcttctactccaatatcatgaacttcttcaagaccgagatcaccctggccaacggggagatccggaagcgcccactgatcgagaccaacggcgagaccggcgagatcgtgtgggacaagggcagggacttcgccaccgtgaggaaggtgctgtccatgccccaggtgaacatcgtgaaaaagaccgaggtgcagaccggggggttctccaaggagagcatcctgcccaagggcaacagcgacaagctgatcgcccggaagaaggactgggaccccaagaagtacggaggcttcttgtatcctaccgtggcctactccgtgctggtggtggccaaggtggagaagggcaagtccaagaagctgaagtcagtgaaggagctgctgggcatcaccatcatggagcggtctagcttcgagaagaatcctattgacttcctggaggccaagggctacaaggaggtcaagaaggatctgatcatcaagctgcccaagtacagcctgttcgagctggagaatggccggaagaggatgctggccagcgccaagttcctgcagaagggcaacgagctggccctgcccagcaagtacgtgaacttcctctatctggccagccactacgagaagctgaagggctctccagaggacaacgagcagaagcagctgttcgtggagcagcacaagcactacctggacgagatcatcgagcagatctccgagttcagcaagcgcgtgatcctggccgacgccaacctggacaaggtgctgtccgcttacaacaagcacagggacaagcccatcagggagcaggccgagaacatcatccacctgttcaccctgaccaacctgggcgcccccagggccttcaagtacttcgataccaccatcgccaggaaggagtacaaaagtactaaggaggtcctggatgccactctgatccaccagagcatcaccgggctgtacgagacccggatcgacctgtcccagctgggcggcgacgagggcgccgacaagcggacagccgacggcagcgagttcgagagccccaagaagaagcggaaggtg

SEQ ID NO: 456 - DNA, 4761 bp, synthetic construct
  source 1..4761: mol_type = other DNA
tcagaagtcgagtttagccacgaatattggatgcgccacgccctcaccctggccaagagagcccgggacgagcgcgaggtgcccgtgggcgccgtcctggtgcacaacaacagggtgatcggcgagggctggaaccgggccatcggcctgcacgaccccacagcccacgccgagatcatggccctgcggcagggtggcctggtcatgcagaactacaggctgtatgacgccaccctgtacaccacattcgagccctgcgtgatgtgcgccggggccatgatccacagccggatcggccgcgtggtgttcggcgtgcggaacgccaagaccggcgccgccggcagcctgatggacgttctgcactaccccgggatgaaccacagggtggagatcacagagggcatcctggcagacgagtgcgccgccctgctgtgcactttcttcaggatgcccagatctgtgttcaaggcccagaagaaggcccagagctccaccgacagcggcgggagctctgggggctcctccgggagcgagacccccgggaccagcgagtccgccacccccgagagcagcggcggcagctccggggggagcgacaagaagtactccatcggcctggccatcggcaccaactccgtgggttgggccgtgatcaccgatgagtacaaggtgcccagcaagaagttcaaggtgctgggcaacaccgacaggcactctatcaagaagaacctgatcggcgccctgctgttcgacagcggggagaccgctgaggccactcggctgaagagaaccgccaggcgcagatacacccggagaaagaaccggatctgctacctgcaggagatcttcagcaacgagatggccaaggtggacgacagcttcttccacaggctggaggagagcttcctggtggaggaggacaagaagcacgagcgccaccccatcttcggcaacatcgtggatgaggtggcctaccacgagaagtaccccaccatctaccacctgcggaagaagctggtggacagcaccgataaggccgatctgcggctgatctacctggccctggcccacatgatcaagttcagggggcacttcctgatcgagggcgacctgaaccccgacaactccgatgtggataaactgttcatccagctggtgcagacctacaaccagctgtttgaggagaatcccatcaacgcctccggcgtggacgccaaggccatcctgagcgcccggctgtccaagagccggaggctggagaatctgatcgcccagctgcctggcgagaagaagaacggcctgttcggcaacctgatcgccctgagcctgggcctgacccccaatttcaagagcaacttcgacctggccgaggatgctaagctgcagctgtccaaggacacctacgacgatgacctggacaacctgctggctcagatcggcgatcagtacgccgacctgttcctggccgccaagaacctgtcagacgccatcctgctgtctgacattctgcgggtgaacaccgagatcaccaaggccccactgtccgcctctatggtgaagaggtacgatgagcaccaccaggacctgaccctgctgaaggctctggtgcggcagcagctgccggagaagtacaaggagatcttcttcgaccagagcaagaacggctacgccggctacatcgacggcggggccagccaggaggagttctacaagttcatcaagcctatcctggagaagatggacggcaccgaggagctgctggtgaagctgaaccgggaggacctgctgcggaagcagaggaccttcgacaacggcatcattccccaccagatccacctgggcgagctgcacgccatcctgcggaggcagggcgacttctaccctttcctgaaggacaacagggagaagatcgagaagatcctgaccttcaggatcccctactacgtgggccccctggcccgcggcaactcccgctttgcctggatgaccagaaagagcgaggagaccatcaccccttggaacttcgaggaggtggtggacaagggcgccagcgcccagagcttcatcgagcgcatgaccaacttcgacaagaatctgcccaacgagaaggtgctgcccaagcactccctgctgtacgagtacttcaccgtgtacaacgagctgacaaaggtgaagtacgtgacagagggcatgcgcaagcccgccttcctgtctggcgagcagaagaaggccatcgtggacctgctgttcaagaccaacaggaaggtgaccgtgaagcagctgaaggaggactacttcaagaagatcgagtgcttcgacagcgtggagatcagcggcgtggaggacaggttcaacgccagcctgggcacctaccacgacctgctgaagatcatcaaggacaaggacttcctggataacgaggagaacgaggatatcctggaggacattgtcctgaccctgaccctgttcgaggatcgggagatgatcgaggagcgcctcaagacctacgcccacctgttcgacgataaggtgatgaagcagctgaagcggctgcgctacaccggctggggccgcctgtcccggaagctgatcaacggcatccgggacaagcagtccggcaagaccatcctggacttcctgaagtccgatggttttgccaacagaaacttcatgcagctgatccacgacgacagcctgaccttcaaggaggacatccagaaggctcaggtgtccggacagggggactccctgcacgagcacatcgccaacctggccggctctcccgccatcaagaagggcatcctgcagaccgtgaaggtggtggacgagctggtgaaggtgatgggcgggcacaagcccgagaacatcgtgatcgagatggcccgggagaaccagaccacccagaagggccagaagaacagcagggagcgcatgaagcgcatcgaggagggcatcaaggagctgggtagccagatcctgaaggagcaccctgtggagaatacccagctgcagaacgagaagctgtatctgtactacctgcagaacggcagggacatgtacgtggatcaggagctggacatcaaccggctgtctgactacgacgtggaccacatcgtgccccagtctttcctgaaggacgacagcatcgacaacaaggtgctgacccgcagcgacaagaacaggggcaagagcgataacgtgccctccgaggaggtggtcaagaagatgaagaactactggcggcagctgctgaacgccaagctgatcacccagcggaagttcgacaacctgaccaaggccgagagaggcggcctgtccgagctggacaaggccggcttcatcaagcggcagctggtggagacccggcagatcaccaagcacgtcgcccagatcctggactccaggatgaacaccaagtacgacgagaacgacaagctgatcagagaggtgaaggtgatcaccctgaagtccaagctggtgagcgacttcaggaaggatttccagttctacaaggtgcgggagatcaacaactatcaccacgcccacgacgcctacctgaacgccgtcgtgggcaccgctctgatcaagaagtatcctaagctggagagcgagttcgtgtacggcgactacaaggtgtacgacgtgcggaagatgatcgccaagagcgagcaggagatcggcaaggccaccgccaagtacttcttctactccaatatcatgaacttcttcaagaccgagatcaccctggccaacggggagatccggaagcgcccactgatcgagaccaacggcgagaccggcgagatcgtgtgggacaagggcagggacttcgccaccgtgaggaaggtgctgtccatgccccaggtgaacatcgtgaaaaagaccgaggtgcagaccggggggttctccaaggagagcatcctgcccaagggcaacagcgacaagctgatcgcccggaagaaggactgggaccccaagaagtacggaggcttcctgtatcctaccgtggcctactccgtgctggtggtggccaaggtggagaagggcaagtccaagaagctgaagtcagtgaaggagctgctgggcatcaccatcatggagcggtctagcttcgagaagaatcctattgacttcctggaggccaagggctacaaggaggtcaagaaggatctgatcatcaagctgcccaagtacagcctgttcgagctggagaatggccggaagaggatgctggccagcgccaagttcctgcagaagggcaacgagctggccctgcccagcaagtacgtgaacttcctctatctggccagccactacgagaagctgaagggctctccagaggacaacgagcagaagcagctgttcgtggagcagcacaagcactacctggacgagatcatcgagcagatctccgagttcagcaagcgcgtgatcctggacgacgccaacctggacaaggtgctgtccgcttacaacaagcacagggacaagcccatcagggagcaggccgagaacatcatccacctgttcaccctgaccaacctgggcgcccccagggccttcaagtacttcgataccaccatcgccaggaaggagtacaaaagtactaaggaggtcctggatgccactctgatccaccagagcatcaccgggctgtacgagacccggatcgacctgtcccagctgggcggcgacgagggcgccgacaagcggacagccgacggcagcgagttcgagagccccaagaagaagcggaaggtg

SEQ ID NO: 457 - DNA, 4761 bp, synthetic construct
  source 1..4761: mol_type = other DNA
tcagaagtcgagtttagccacgaatattggatgcgccacgccctcaccctggccaagagagcccgggacgagcgcgaggtgcccgtgggcgccgtcctggtgcacaacaacagggtgatcggcgagggctggaaccgggccatcggcctgcacgaccccacagcccacgccgagatcatggccctgcggcagggtggcctggtcatgcagaactacaggctgtatgacgccaccctgtacaccacattcgagccctgcgtgatgtgcgccggggccatgatccacagccggatcggccgcgtggtgttcggcgtgcggaacgccaagaccggcgccgccggcagcctgatggacgttctgcactaccccgggatgaaccacagggtggagatcacagagggcatcctggcagacgagtgcgccgccctgctgtgcactttcttcaggatgcccagatctgtgttcaaggcccagaagaaggcccagagctccaccgacagcggcgggagctctgggggctcctccgggagcgagacccccgggaccagcgagtccgccacccccgagagcagcggcggcagctccggggggagcgacaagaagtactccatcggcctggccatcggcaccaactccgtgggttgggccgtgatcaccgatgagtacaaggtgcccagcaagaagttcaaggtgctgggcaacaccgacaggcactctatcaagaagaacctgatcggcgccctgctgttcgacagcggggagaccgctgaggccactcggctgaagagaaccgccaggcgcagatacacccggagaaagaaccggatctgctacctgcaggagatcttcagcaacgagatggccaaggtggacgacagcttcttccacaggctggaggagagcttcctggtggaggaggacaagaagcacgagcgccaccccatcttcggcaacatcgtggatgaggtggcctaccacgagaagtaccccaccatctaccacctgcggaagaagctggtggacagcaccgataaggccgatctgcggctgatctacctggccctggcccacatgatcaagttcagggggcacttcctgatcgagggcgacctgaaccccgacaactccgatgtggataaactgttcatccagctggtgcagacctacaaccagctgtttgaggagaatcccatcaacgcctccggcgtggacgccaaggccatcctgagcgcccggctgtccaagagccggaggctggagaatctgatcgcccagctgcctggcgagaagaagaacggcctgttcggcaacctgatcgccctgagcctgggcctgacccccaatttcaagagcaacttcgacctggccgaggatgctaagctgcagctgtccaaggacacctacgacgatgacctggacaacctgctggctcagatcggcgatcagtacgccgacctgttcctggccgccaagaacctgtcagacgccatcctgctgtctgacattctgcgggtgaacaccgagatcaccaaggccccactgtccgcctctatggtgaagaggtacgatgagcaccaccaggacctgaccctgctgaaggctctggtgcggcagcagctgccggagaagtacaaggagatcttcttcgaccagagcaagaacggctacgccggctacatcgacggcggggccagccaggaggagttctacaagttcatcaagcctatcctggagaagatggacggcaccgaggagctgctggtgaagctgaaccgggaggacctgctgcggaagcagaggaccttcgacaacggcatcattccccaccagatccacctgggcgagctgcacgccatcctgcggaggcagggcgacttctaccctttcctgaaggacaacagggagaagatcgagaagatcctgaccttcaggatcccctactacgtgggccccctggcccgcggcaactcccgctttgcctggatgaccagaaagagcgaggagaccatcaccccttggaacttcgaggaggtggtggacaagggcgccagcgcccagagcttcatcgagcgcatgaccaacttcgacaagaatctgcccaacgagaaggtgctgcccaagcactccctgctgtacgagtacttcaccgtgtacaacgagctgacaaaggtgaagtacgtgacagagggcatgcgcaagcccgccttcctgtctggcgagcagaagaaggccatcgtggacctgctgttcaagaccaacaggaaggtgaccgtgaagcagctgaaggaggactacttcaagaagatcgagtgcttcgacagcgtggagatcagcggcgtggaggacaggttcaacgccagcctgggcacctaccacgacctgctgaagatcatcaaggacaaggacttcctggataacgaggagaacgaggatatcctggaggacattgtcctgaccctgaccctgttcgaggatcgggagatgatcgaggagcgcctcaagacctacgcccacctgttcgacgataaggtgatgaagcagctgaagcggctgcgctacaccggctggggccgcctgtcccggaagctgatcaacggcatccgggacaagcagtccggcaagaccatcctggacttcctgaagtccgatggttttgccaacagaaacttcatgcagctgatccacgacgacagcctgaccttcaaggaggacatccagaaggctcaggtgtccggacagggggactccctgcacgagcacatcgccaacctggccggctctcccgccatcaagaagggcatcctgcagaccgtgaaggtggtggacgagctggtgaaggtgatgggcgggcacaagcccgagaacatcgtgatcgagatggcccgggagaaccagaccacccagaagggccagaagaacagcagggagcgcatgaagcgcatcgaggagggcatcaaggagctgggtagccagatcctgaaggagcaccctgtggagaatacccagctgcagaacgagaagctgtatctgtactacctgcagaacggcagggacatgtacgtggatcaggagctggacatcaaccggctgtctgactacgacgtggaccacatcgtgccccagtctttcctgaaggacgacagcatcgacaacaaggtgctgacccgcagcgacaagaacaggggcaagagcgataacgtgccctccgaggaggtggtcaagaagatgaagaactactggcggcagctgctgaacgccaagctgatcacccagcggaagttcgacaacctgaccaaggccgagagaggcggcctgtccgagctggacaaggccggcttcatcaagcggcagctggtggagacccggcagatcaccaagcacgtcgcccagatcctggactccaggatgaacaccaagtacgacgagaacgacaagctgatcagagaggtgaaggtgatcaccctgaagtccaagctggtgagcgacttcaggaaggatttccagttctacaaggtgcgggagatcaacaactatcaccacgcccacgacgcctacctgaacgccgtcgtgggcaccgctctgatcaagaagtatcctaagctggagagcgagttcgtgtacggcgactacaaggtgtacgacgtgcggaagatgatcgccaagagcgagcaggagatcggcaaggccaccgccaagtacttcttctactccaatatcatgaacttcttcaagaccgagatcaccctggccaacggggagatccggaagcgcccactgatcgagaccaacggcgagaccggcgagatcgtgtgggacaagggcagggacttcgccaccgtgaggaaggtgctgtccatgccccaggtgaacatcgtgaaaaagaccgaggtgcagaccggggggttctccaaggagagcatcctgcccaagggcaacagcgacaagctgatcgcccggaagaaggactgggaccccaagaagtacggaggcttcctgcagcctaccgtggcctactccgtgctggtggtggccaaggtggagaagggcaagtccaagaagctgaagtcagtgaaggagctgctgggcatcaccatcatggagcggtctagcttcgagaagaatcctattgacttcctggaggccaagggctacaaggaggtcaagaaggatctgatcatcaagctgcccaagtacagcctgttcgagctggagaatggccggaagaggatgctggccagcgccaagttcctgcagaagggcaacgagctggccctgcccagcaagtacgtgaacttcctctatctggccagccactacgagaagctgaagggctctccaaaggacaacgagcagaagcagctgttcgtggagcagcacaagcactacctggacgagatcatcgagcagatctccgagttcagcaagcgcgtgatcctggacgacgccaacctggacaaggtgctgtccgcttacaacaagcacagggacaagcccatcagggagcaggccgagaacatcatccacctgttcaccctgaccaacctgggcgcccccagggccttcaagtacttcgataccaccatcgccaggaaggagtacaaaagtactaaggaggtcctggatgccactctgatccaccagagcatcaccgggctgtacgagacccggatcgacctgtcccagctgggcggcgacgagggcgccgacaagcggacagccgacggcagcgagttcgagagccccaagaagaagcggaaggtg

SEQ ID NO: 458 - DNA, 4761 bp, synthetic construct
  source 1..4761: mol_type = other DNA
tcagaagtcgagtttagccacgaatattggatgcgccacgccctcaccctggccaagagagcccgggacgagcgcgaggtgcccgtgggcgccgtcctggtgcacaacaacagggtgatcggcgagggctggaaccgggccatcggcctgcacgaccccacagcccacgccgagatcatggccctgcggcagggtggcctggtcatgcagaactacaggctgtatgacgccaccctgtacaccacattcgagccctgcgtgatgtgcgccggggccatgatccacagccggatcggccgcgtggtgttcggcgtgcggaacgccaagaccggcgccgccggcagcctgatggacgttctgcactaccccgggatgaaccacagggtggagatcacagagggcatcctggcagacgagtgcgccgccctgctgtgcactttcttcaggatgcccagatctgtgttcaaggcccagaagaaggcccagagctccaccgacagcggcgggagctctgggggctcctccgggagcgagacccccgggaccagcgagtccgccacccccgagagcagcggcggcagctccggggggagcgacaagaagtactccatcggcctggccatcggcaccaactccgtgggttgggccgtgatcaccgatgagtacaaggtgcccagcaagaagttcaaggtgctgggcaacaccgacaggcactctatcaagaagaacctgatcggcgccctgctgttcgacagcggggagaccgctgaggccactcggctgaagagaaccgccaggcgcagatacacccggagaaagaaccggatctgctacctgcaggagatcttcagcaacgagatggccaaggtggacgacagcttcttccacaggctggaggagagcttcctggtggaggaggacaagaagcacgagcgccaccccatcttcggcaacatcgtggatgaggtggcctaccacgagaagtaccccaccatctaccacctgcggaagaagctggtggacagcaccgataaggccgatctgcggctgatctacctggccctggcccacatgatcaagttcagggggcacttcctgatcgagggcgacctgaaccccgacaactccgatgtggataaactgttcatccagctggtgcagacctacaaccagctgtttgaggagaatcccatcaacgcctccggcgtggacgccaaggccatcctgagcgcccggctgtccaagagccggaggctggagaatctgatcgcccagctgcctggcgagaagaagaacggcctgttcggcaacctgatcgccctgagcctgggcctgacccccaatttcaagagcaacttcgacctggccgaggatgctaagctgcagctgtccaaggacacctacgacgatgacctggacaacctgctggctcagatcggcgatcagtacgccgacctgttcctggccgccaagaacctgtcagacgccatcctgctgtctgacattctgcgggtgaacaccgagatcaccaaggccccactgtccgcctctatggtgaagaggtacgatgagcaccaccaggacctgaccctgctgaaggctctggtgcggcagcagctgccggagaagtacaaggagatcttcttcgaccagagcaagaacggctacgccggctacatcgacggcggggccagccaggaggagttctacaagttcatcaagcctatcctggagaagatggacggcaccgaggagctgctggtgaagctgaaccgggaggacctgctgcggaagcagaggaccttcgacaacggcatcattccccaccagatccacctgggcgagctgcacgccatcctgcggaggcagggcgacttctaccctttcctgaaggacaacagggagaagatcgagaagatcctgaccttcaggatcccctactacgtgggccccctggcccgcggcaactcccgctttgcctggatgaccagaaagagcgaggagaccatcaccccttggaacttcgaggaggtggtggacaagggcgccagcgcccagagcttcatcgagcgcatgaccaacttcgacaagaatctgcccaacgagaaggtgctgcccaagcactccctgctgtacgagtacttcaccgtgtacaacgagctgacaaaggtgaagtacgtgacagagggcatgcgcaagcccgccttcctgtctggcgagcagaagaaggccatcgtggacctgctgttcaagaccaacaggaaggtgaccgtgaagcagctgaaggaggactacttcaagaagatcgagtgcttcgacagcgtggagatcagcggcgtggaggacaggttcaacgccagcctgggcacctaccacgacctgctgaagatcatcaaggacaaggacttcctggataacgaggagaacgaggatatcctggaggacattgtcctgaccctgaccctgttcgaggatcgggagatgatcgaggagcgcctcaagacctacgcccacctgttcgacgataaggtgatgaagcagctgaagcggctgcgctacaccggctggggccgcctgtcccggaagctgatcaacggcatccgggacaagcagtccggcaagaccatcctggacttcctgaagtccgatggttttgccaacagaaacttcatgcagctgatccacgacgacagcctgaccttcaaggaggacatccagaaggctcaggtgtccggacagggggactccctgcacgagcacatcgccaacctggccggctctcccgccatcaagaagggcatcctgcagaccgtgaaggtggtggacgagctggtgaaggtgatgggcgggcacaagcccgagaacatcgtgatcgagatggcccgggagaaccagaccacccagaagggccagaagaacagcagggagcgcatgaagcgcatcgaggagggcatcaaggagctgggtagccagatcctgaaggagcaccctgtggagaatacccagctgcagaacgagaagctgtatctgtactacctgcagaacggcagggacatgtacgtggatcaggagctggacatcaaccggctgtctgactacgacgtggaccacatcgtgccccagtctttcctgaaggacgacagcatcgacaacaaggtgctgacccgcagcgacaagaacaggggcaagagcgataacgtgccctccgaggaggtggtcaagaagatgaagaactactggcggcagctgctgaacgccaagctgatcacccagcggaagttcgacaacctgaccaaggccgagagaggcggcctgtccgagctggacaaggccggcttcatcaagcggcagctggtggagacccggcagatcaccaagcacgtcgcccagatcctggactccaggatgaacaccaagtacgacgagaacgacaagctgatcagagaggtgaaggtgatcaccctgaagtccaagctggtgagcgacttcaggaaggatttccagttctacaaggtgcgggagatcaacaactatcaccacgcccacgacgcctacctgaacgccgtcgtgggcaccgctctgatcaagaagtatcctaagctggagagcgagttcgtgtacggcgactacaaggtgtacgacgtgcggaagatgatcgccaagagcgagcaggagatcggcaaggccaccgccaagtacttcttctactccaatatcatgaacttcttcaagaccgagatcaccctggccaacggggagatccggaagcgcccactgatcgagaccaacggcgagaccggcgagatcgtgtgggacaagggcagggacttcgccaccgtgaggaaggtgctgtccatgccccaggtgaacatcgtgaaaaagaccgaggtgcagaccggggggttctccaaggagagcatcctgcccaagggcaacagcgacaagctgatcgcccggaagaaggactgggaccccaagaagtacggaggcttcatgtatcctaccgtggcctactccgtgctggtggtggccaaggtggagaagggcaagtccaagaagctgaagtcagtgaaggagctgctgggcatcaccatcatggagcggtctagcttcgagaagaatcctattgacttcctggaggccaagggctacaaggaggtcaagaaggatctgatcatcaagctgcccaagtacagcctgttcgagctggagaatggccggaagaggatgctggccagcgccaagttcctgcagaagggcaacgagctggccctgcccagcaagtacgtgaacttcctctatctggccagccactacgagaagctgaagggctctccaaaggacaacgagcagaagcagctgttcgtggagcagcacaagcactacctggacgagatcatcgagcagatctccgagttcagcaagcgcgtgatcctggacgacgccaacctggacaaggtgctgtccgcttacaacaagcacagggacaagcccatcagggagcaggccgagaacatcatccacctgttcaccctgaccaacctgggcgcccccagggccttcaagtacttcgataccaccatcgccaggaaggagtacaggagtactaaggaggtcctggatgccactctgatccaccagagcatcaccgggctgtacgagacccggatcgacctgtcccagctgggcggcgacgagggcgccgacaagcggacagccgacggcagcgagttcgagagccccaagaagaagcggaaggtg

SEQ ID NO: 459 - DNA, 5199 bp, synthetic construct
  source 1..5199: mol_type = other DNA
tcagaagtcgagtttagccacgaatattggatgcgccacgccctcaccctggccaagagagcccgggacgagcgcgaggtgcccgtgggcgccgtcctggtgcacaacaacagggtgatcggcgagggctggaaccgggccatcggcctgcacgaccccacagcccacgccgagatcatggccctgcggcagggtggcctggtcatgcagaactacaggctgtatgacgccaccctgtacaccacattcgagccctgcgtgatgtgcgccggggccatgatccacagccggatcggccgcgtggtgttcggcgtgcggaacgccaagaccggcgccgccggcagcctgatggacgttctgcactaccccgggatgaaccacagggtggagatcacagagggcatcctggcagacgagtgcgccgccctgctgtgcactttcttcaggatgcccagatctgtgttcaaggcccagaagaaggcccagagctccaccgacaaaggccctaagcccaagaaggaagagagcgagaaggacaagaagtactccatcggcctggccatcggcaccaactccgtgggttgggccgtgatcaccgatgagtacaaggtgcccagcaagaagttcaaggtgctgggcaacaccgacaggcactctatcaagaagaacctgatcggcgccctgctgttcgacagcggggagaccgctgaggccactcggctgaagagaaccgccaggcgcagatacacccggagaaagaaccggatctgctacctgcaggagatcttcagcaacgagatggccaaggtggacgacagcttcttccacaggctggaggagagcttcctggtggaggaggacaagaagcacgagcgccaccccatcttcggcaacatcgtggatgaggtggcctaccacgagaagtaccccaccatctaccacctgcggaagaagctggtggacagcaccgataaggccgatctgcggctgatctacctggccctggcccacatgatcaagttcagggggcacttcctgatcgagggcgacctgaaccccgacaactccgatgtggataaactgttcatccagctggtgcagacctacaaccagctgtttgaggagaatcccatcaacgcctccggcgtggacgccaaggccatcctgagcgcccggctgtccaagagccggaggctggagaatctgatcgcccagctgcctggcgagaagaagaacggcctgttcggcaacctgatcgccctgagcctgggcctgacccccaatttcaagagcaacttcgacctggccgaggatgctaagctgcagctgtccaaggacacctacgacgatgacctggacaacctgctggctcagatcggcgatcagtacgccgacctgttcctggccgccaagaacctgtcagacgccatcctgctgtctgacattctgcgggtgaacaccgagatcaccaaggccccactgtccgcctctatggtgaagaggtacgatgagcaccaccaggacctgaccctgctgaaggctctggtgcggcagcagctgccggagaagtacaaggagatcttcttcgaccagagcaagaacggctacgccggctacatcgacggcggggccagccaggaggagttctacaagttcatcaagcctatcctggagaagatggacggcaccgaggagctgctggtgaagctgaaccgggaggacctgctgcggaagcagaggaccttcgacaacggcatcattccccaccagatccacctgggcgagctgcacgccatcctgcggaggcagggcgacttctaccctttcctgaaggacaacagggagaagatcgagaagatcctgaccttcaggatcccctactacgtgggccccctggcccgcggcaactcccgctttgcctggatgaccagaaagagcgaggagaccatcaccccttggaacttcgaggaggtggtggacaagggcgccagcgcccagagcttcatcgagcgcatgaccaacttcgacaagaatctgcccaacgagaaggtgctgcccaagcactccctgctgtacgagtacttcaccgtgtacaacgagctgacaaaggtgaagtacgtgacagagggcatgcgcaagcccgccttcctgtctggcgagcagaagaaggccatcgtggacctgctgttcaagaccaacaggaaggtgaccgtgaagcagctgaaggaggactacttcaagaagatcgagtgcttcgacagcgtggagatcagcggcgtggaggacaggttcaacgccagcctgggcacctaccacgacctgctgaagatcatcaaggacaaggacttcctggataacgaggagaacgaggatatcctggaggacattgtcctgaccctgaccctgttcgaggatcgggagatgatcgaggagcgcctcaagacctacgcccacctgttcgacgataaggtgatgaagcagctgaagcggctgcgctacaccggctggggccgcctgtcccggaagctgatcaacggcatccgggacaagcagtccggcaagaccatcctggacttcctgaagtccgatggttttgccaacagaaacttcatgcagctgatccacgacgacagcctgaccttcaaggaggacatccagaaggctcaggtgtccggacagggggactccctgcacgagcacatcgccaacctggccggctctcccgccatcaagaagggcatcctgcagaccgtgaaggtggtggacgagctggtgaaggtgatgggcgggcacaagcccgagaacatcgtgatcgagatggcccgggagaaccagaccacccagaagggccagaagaacagcagggagcgcatgaagcgcatcgaggagggcatcaaggagctgggtagccagatcctgaaggagcaccctgtggagaatacccagctgcagaacgagaagctgtatctgtactacctgcagaacggcagggacatgtacgtggatcaggagctggacatcaaccggctgtctgactacgacgtggaccacatcgtgccccagtctttcctgaaggacgacagcatcgacaacaaggtgctgacccgcagcgacaagaacaggggcaagagcgataacgtgccctccgaggaggtggtcaagaagatgaagaactactggcggcagctgctgaacgccaagctgatcacccagcggaagttcgtcagaagtcgagtttagccacgaatattggatgcgccacgccctcaccctggccaagagagcccgggacgagcgcgaggtgcccgtgggcgccgtcctggtgcacaacaacagggtgatcggcgagggctggaaccgggccatcggcctgcacgaccccacagcccacgccgagatcatggccctgcggcagggtggcctggtcatgcagaactacaggctgtatgacgccaccctgtacaccacattcgagccctgcgtgatgtgcgccggggccatgatccacagccggatcggccgcgtggtgttcggcgtgcggaacgccaagaccggcgccgccggcagcctgatggacgttctgcactaccccgggatgaaccacagggtggagatcacagagggcatcctggcagacgagtgcgccgccctgctgtgcactttcttcaggatgcccagatctgtgttcaaggcccagaagaaggcccagagctccaccgacacaacctgaccaaggccgagagaggcggcctgtccgagctggacaaggccggcttcatcaagcggcagctggtggagacccggcagatcaccaagcacgtcgcccagatcctggactccaggatgaacaccaagtacgacgagaacgacaagctgatcagagaggtgaaggtgatcaccctgaagtccaagctggtgagcgacttcaggaaggatttccagttctacaaggtgcgggagatcaacaactatcaccacgcccacgacgcctacctgaacgccgtcgtgggcaccgctctgatcaagaagtatcctaagctggagagcgagttcgtgtacggcgactacaaggtgtacgacgtgcggaagatgatcgccaagagcgagcaggagatcggcaaggccaccgccaagtacttcttctactccaatatcatgaacttcttcaagaccgagatcaccctggccaacggggagatccggaagcgcccactgatcgagaccaacggcgagaccggcgagatcgtgtgggacaagggcagggacttcgccaccgtgaggaaggtgctgtccatgccccaggtgaacatcgtgaaaaagaccgaggtgcagaccggggggttctccaaggagagcatcctgcccaagggcaacagcgacaagctgatcgcccggaagaaggactgggaccccaagaagtacggaggcttcctgtatcctaccgtggcctactccgtgctggtggtggccaaggtggagaagggcaagtccaagaagctgaagtcagtgaaggagctgctgggcatcaccatcatggagcggtctagcttcgagaagaatcctattgacttcctggaggccaagggctacaaggaggtcaagaaggatctgatcatcaagctgcccaagtacagcctgttcgagctggagaatggccggaagaggatgctggccagcgccaagttcctgcagaagggcaacgagctggccctgcccagcaagtacgtgaacttcctctatctggccagccactacgagaagctgaagggctctccagaggacaacgagcagaagcagctgttcgtggagcagcacaagcactacctggacgagatcatcgagcagatctccgagttcagcaagcgcgtgatcctggacgacgccaacctggacaaggtgctgtccgcttacaacaagcacagggacaagcccatcagggagcaggccgagaacatcatccacctgttcaccctgaccaacctgggcgcccccagggccttcaagtacttcgataccaccatcgccaggaaggagtacaaaagtactaaggaggtcctggatgccactctgatccaccagagcatcaccgggctgtacgagacccggatcgacctgtcccagctgggcggcgacgagggcgccgacaagcggacagccgacggcagcgagttcgagagccccaagaagaagcggaaggtg

SEQ ID NO: 460 - DNA, 4761 bp, synthetic construct
  source 1..4761: mol_type = other DNA
tcagaagtcgagtttagccacgaatattggatgcgccacgccctcaccctggccaagagagcccgggacgagcgcgaggtgcccgtgggcgccgtcctggtgcacaacaacagggtgatcggcgagggctggaaccgggccatcggcctgcacgaccccacagcccacgccgagatcatggccctgcggcagggtggcctggtcatgcagaactacaggctgtatgacgccaccctgtacaccacattcgagccctgcgtgatgtgcgccggggccatgatccacagccggatcggccgcgtggtgttcggcgtgcggaacgccaagaccggcgccgccggcagcctgatggacgttctgcactaccccgggatgaaccacagggtggagatcacagagggcatcctggcagacgagtgcgccgccctgctgtgcactttcttcaggatgcccagatctgtgttcaaggcccagaagaaggcccagagctccaccgacagcggcgggagctctgggggctcctccgggagcgagacccccgggaccagcgagtccgccacccccgagagcagcggcggcagctccggggggagcgacaagaagtactccatcggcctggccatcggcaccaactccgtgggttgggccgtgatcaccgatgagtacaaggtgcccagcaagaagttcaaggtgctgggcaacaccgacaggcactctatcaagaagaacctgatcggcgccctgctgttcgacagcggggagaccgctgaggccactcggctgaagagaaccgccaggcgcagatacacccggagaaagaaccggatctgctacctgcaggagatcttcagcaacgagatggccaaggtggacgacagcttcttccacaggctggaggagagcttcctggtggaggaggacaagaagcacgagcgccaccccatcttcggcaacatcgtggatgaggtggcctaccacgagaagtaccccaccatctaccacctgcggaagaagctggtggacagcaccgataaggccgatctgcggctgatctacctggccctggcccacatgatcaagttcagggggcacttcctgatcgagggcgacctgaaccccgacaactccgatgtggataaactgttcatccagctggtgcagacctacaaccagctgtttgaggagaatcccatcaacgcctccggcgtggacgccaaggccatcctgagcgcccggctgtccaagagccggaggctggagaatctgatcgcccagctgcctggcgagaagaagaacggcctgttcggcaacctgatcgccctgagcctgggcctgacccccaatttcaagagcaacttcgacctggccgaggatgctaagctgcagctgtccaaggacacctacgacgatgacctggacaacctgctggctcagatcggcgatcagtacgccgacctgttcctggccgccaagaacctgtcagacgccatcctgctgtctgacattctgcgggtgaacaccgagatcaccaaggccccactgtccgcctctatggtgaagaggtacgatgagcaccaccaggacctgaccctgctgaaggctctggtgcggcagcagctgccggagaagtacaaggagatcttcttcgaccagagcaagaacggctacgccggctacatcgacggcggggccagccaggaggagttctacaagttcatcaagcctatcctggagaagatggacggcaccgaggagctgctggtgaagctgaaccgggaggacctgctgcggaagcagaggaccttcgacaacggcatcattccccaccagatccacctgggcgagctgcacgccatcctgcggaggcagggcgacttctaccctttcctgaaggacaacagggagaagatcgagaagatcctgaccttcaggatcccctactacgtgggccccctggcccgcggcaactcccgctttgcctggatgaccagaaagagcgaggagaccatcaccccttggaacttcgaggaggtggtggacaagggcgccagcgcccagagcttcatcgagcgcatgaccaacttcgacaagaatctgcccaacgagaaggtgctgcccaagcactccctgctgtacgagtacttcaccgtgtacaacgagctgacaaaggtgaagtacgtgacagagggcatgcgcaagcccgccttcctgtctggcgagcagaagaaggccatcgtggacctgctgttcaagaccaacaggaaggtgaccgtgaagcagctgaaggaggactacttcaagaagatcgagtgcttcgacagcgtggagatcagcggcgtggaggacaggttcaacgccagcctgggcacctaccacgacctgctgaagatcatcaaggacaaggacttcctggataacgaggagaacgaggatatcctggaggacattgtcctgaccctgaccctgttcgaggatcgggagatgatcgaggagcgcctcaagacctacgcccacctgttcgacgataaggtgatgaagcagctgaagcggctgcgctacaccggctggggccgcctgtcccggaagctgatcaacggcatccgggacaagcagtccggcaagaccatcctggacttcctgaagtccgatggttttgccaacagaaacttcatgcagctgatccacgacgacagcctgaccttcaaggaggacatccagaaggctcaggtgtccggacagggggactccctgcacgagcacatcgccaacctggccggctctcccgccatcaagaagggcatcctgcagaccgtgaaggtggtggacgagctggtgaaggtgatgggcgggcacaagcccgagaacatcgtgatcgagatggccgctgagaacgccaccacccagaagggccagaagaacagcagggagcgcatgaagcgcatcgaggagggcatcaaggagctgggtagccagatcctgaaggagcaccctgtggagaatacccagctgcagaacgagaagctgtatctgtactacctgcagaacggcagggacatgtacgtggatcaggagctggacatcaaccggctgtctgactacgacgtggaccacatcgtgccccagtctttcctgaaggacgacagcatcgacaacaaggtgctgacccgcagcgacaagaacaggggcaagagcgataacgtgccctccgaggaggtggtcaagaagatgaagaactactggcggcagctgctgaacgccaagctgatcacccagcggaagttcgacaacctgaccaaggccgagagaggcggcctgtccgagctggacaaggccggcttcatcaagcggcagctggtggagacccggcagatcaccaagcacgtcgcccagatcctggactccaggatgaacaccaagtacgacgagaacgacaagctgatcagagaggtgaaggtgatcaccctgaagtccaagctggtgagcgacttcaggaaggatttccagttctacaaggtgcgggagatcaacaactatcaccacgcccacgacgcctacctgaacgccgtcgtgggcaccgctctgatcaagaagtatcctaagctggagagcgagttcgtgtacggcgactacaaggtgtacgacgtgcggaagatgatcgccaagagcgagcaggagatcggcaaggccaccgccaagtacttcttctactccaatatcatgaacttcttcaagaccgagatcaccctggccaacggggagatccggaagcgcccactgatcgagaccaacggcgagaccggcgagatcgtgtgggacaagggcagggacttcgccaccgtgaggaaggtgctgtccatgccccaggtgaacatcgtgaaaaagaccgaggtgcagaccggggggttctccaaggagagcatcctgcccaagggcaacagcgacaagctgatcgcccggaagaaggactgggaccccaagaagtacggaggcttcctgtatcctaccgtggcctactccgtgctggtggtggccaaggtggagaagggcaagtccaagaagctgaagtcagtgaaggagctgctgggcatcaccatcatggagcggtctagcttcgagaagaatcctattgacttcctggaggccaagggctacaaggaggtcaagaaggatctgatcatcaagctgcccaagtacagcctgttcgagctggagaatggccggaagaggatgctggccagcgccaagttcctgcagaagggcaacgagctggccctgcccagcaagtacgtgaacttcctctatctggccagccactacgagaagctgaagggctctccagaggacaacgagcagaagcagctgttcgtggagcagcacaagcactacctggacgagatcatcgagcagatctccgagttcagcaagcgcgtgatcctggacgacgccaacctggacaaggtgctgtccgcttacaacaagcacagggacaagcccatcagggagcaggccgagaacatcatccacctgttcaccctgaccaacctgggcgcccccagggccttcaagtacttcgataccaccatcgccaggaaggagtacaaaagtactaaggaggtcctggatgccactctgatccaccagagcatcaccgggctgtacgagacccggatcgacctgtcccagctgggcggcgacgagggcgccgacaagcggacagccgacggcagcgagttcgagagccccaagaagaagcggaaggtg

SEQ ID NO: 461 - DNA, 4701 bp, synthetic construct
  source 1..4701: mol_type = other DNA
tcagaagtcgagtttagccacgaatattggatgcgccacgccctcaccctggccaagagagcccgggacgagcgcgaggtgcccgtgggcgccgtcctggtgcacaacaacagggtgatcggcgagggctggaaccgggccatcggcctgcacgaccccacagcccacgccgagatcatggccctgcggcagggtggcctggtcatgcagaactacaggctgtatgacgccaccctgtacaccacattcgagccctgcgtgatgtgcgccggggccatgatccacagccggatcggccgcgtggtgttcggcgtgcggaacgccaagaccggcgccgccggcagcctgatggacgttctgcactaccccgggatgaaccacagggtggagatcacagagggcatcctggcagacgagtgcgccgccctgctgtgcactttcttcaggatgcccagatctgtgttcaaggcccagaagaaggcccagagctccaccgacaaaggccctaagcccaagaaggaagagagcgagaaggacaagaagtactccatcggcctggccatcggcaccaactccgtgggttgggccgtgatcaccgatgagtacaaggtgcccagcaagaagttcaaggtgctgggcaacaccgacaggcactctatcaagaagaacctgatcggcgccctgctgttcgacagcggggagaccgctgaggccactcggctgaagagaaccgccaggcgcagatacacccggagaaagaaccggatctgctacctgcaggagatcttcagcaacgagatggccaaggtggacgacagcttcttccacaggctggaggagagcttcctggtggaggaggacaagaagcacgagcgccaccccatcttcggcaacatcgtggatgaggtggcctaccacgagaagtaccccaccatctaccacctgcggaagaagctggtggacagcaccgataaggccgatctgcggctgatctacctggccctggcccacatgatcaagttcagggggcacttcctgatcgagggcgacctgaaccccgacaactccgatgtggataaactgttcatccagctggtgcagacctacaaccagctgtttgaggagaatcccatcaacgcctccggcgtggacgccaaggccatcctgagcgcccggctgtccaagagccggaggctggagaatctgatcgcccagctgcctggcgagaagaagaacggcctgttcggcaacctgatcgccctgagcctgggcctgacccccaatttcaagagcaacttcgacctggccgaggatgctaagctgcagctgtccaaggacacctacgacgatgacctggacaacctgctggctcagatcggcgatcagtacgccgacctgttcctggccgccaagaacctgtcagacgccatcctgctgtctgacattctgcgggtgaacaccgagatcaccaaggccccactgtccgcctctatggtgaagaggtacgatgagcaccaccaggacctgaccctgctgaaggctctggtgcggcagcagctgccggagaagtacaaggagatcttcttcgaccagagcaagaacggctacgccggctacatcgacggcggggccagccaggaggagttctacaagttcatcaagcctatcctggagaagatggacggcaccgaggagctgctggtgaagctgaaccgggaggacctgctgcggaagcagaggaccttcgacaacggcatcattccccaccagatccacctgggcgagctgcacgccatcctgcggaggcagggcgacttctaccctttcctgaaggacaacagggagaagatcgagaagatcctgaccttcaggatcccctactacgtgggccccctggcccgcggcaactcccgctttgcctggatgaccagaaagagcgaggagaccatcaccccttggaacttcgaggaggtggtggacaagggcgccagcgcccagagcttcatcgagcgcatgaccaacttcgacaagaatctgcccaacgagaaggtgctgcccaagcactccctgctgtacgagtacttcaccgtgtacaacgagctgacaaaggtgaagtacgtgacagagggcatgcgcaagcccgccttcctgtctggcgagcagaagaaggccatcgtggacctgctgttcaagaccaacaggaaggtgaccgtgaagcagctgaaggaggactacttcaagaagatcgagtgcttcgacagcgtggagatcagcggcgtggaggacaggttcaacgccagcctgggcacctaccacgacctgctgaagatcatcaaggacaaggacttcctggataacgaggagaacgaggatatcctggaggacattgtcctgaccctgaccctgttcgaggatcgggagatgatcgaggagcgcctcaagacctacgcccacctgttcgacgataaggtgatgaagcagctgaagcggctgcgctacaccggctggggccgcctgtcccggaagctgatcaacggcatccgggacaagcagtccggcaagaccatcctggacttcctgaagtccgatggttttgccaacagaaacttcatgcagctgatccacgacgacagcctgaccttcaaggaggacatccagaaggctcaggtgtccggacagggggactccctgcacgagcacatcgccaacctggccggctctcccgccatcaagaagggcatcctgcagaccgtgaaggtggtggacgagctggtgaaggtgatgggcgggcacaagcccgagaacatcgtgatcgagatggcccgggagaaccagaccacccagaagggccagaagaacagcagggagcgcatgaagcgcatcgaggagggcatcaaggagctgggtagccagatcctgaaggagcaccctgtggagaatacccagctgcagaacgagaagctgtatctgtactacctgcagaacggcagggacatgtacgtggatcaggagctggacatcaaccggctgtctgactacgacgtggaccacatcgtgccccagtctttcctgaaggacgacagcatcgacaacaaggtgctgacccgcagcgacaagaacaggggcaagagcgataacgtgccctccgaggaggtggtcaagaagatgaagaactactggcggcagctgctgaacgccaagctgatcacccagcggaagttcgacaacctgaccaaggccgagagaggcggcctgtccgagctggacaaggccggcttcatcaagcggcagctggtggagacccggcagatcaccaagcacgtcgcccagatcctggactccaggatgaacaccaagtacgacgagaacgacaagctgatcagagaggtgaaggtgatcaccctgaagtccaagctggtgagcgacttcaggaaggatttccagttctacaaggtgcgggagatcaacaactatcaccacgcccacgacgcctacctgaacgccgtcgtgggcaccgctctgatcaagaagtatcctaagctggagagcgagttcgtgtacggcgactacaaggtgtacgacgtgcggaagatgatcgccaagagcgagcaggagatcggcaaggccaccgccaagtacttcttctactccaatatcatgaacttcttcaagaccgagatcaccctggccaacggggagatccggaagcgcccactgatcgagaccaacggcgagaccggcgagatcgtgtgggacaagggcagggacttcgccaccgtgaggaaggtgctgtccatgccccaggtgaacatcgtgaaaaagaccgaggtgcagaccggggggttctccaaggagagcatcctgcccaagggcaacagcgacaagctgatcgcccggaagaaggactgggaccccaagaagtacggaggcttcatgtatcctaccgtggcctactccgtgctggtggtggccaaggtggagaagggcaagtccaagaagctgaagtcagtgaaggagctgctgggcatcaccatcatggagcggtctagcttcgagaagaatcctattgacttcctggaggccaagggctacaaggaggtcaagaaggatctgatcatcaagctgcccaagtacagcctgttcgagctggagaatggccggaagaggatgctggccagcgccaagttcctgcagaagggcaacgagctggccctgcccagcaagtacgtgaacttcctctatctggccagccactacgagaagctgaagggctctccaaaggacaacgagcagaagcagctgttcgtggagcagcacaagcactacctggacgagatcatcgagcagatctccgagttcagcaagcgcgtgatcctggacgacgccaacctggacaaggtgctgtccgcttacaacaagcacagggacaagcccatcagggagcaggccgagaacatcatccacctgttcaccctgaccaacctgggcgcccccagggccttcaagtacttcgataccaccatcgccaggaaggagtacaggagtactaaggaggtcctggatgccactctgatccaccagagcatcaccgggctgtacgagacccggatcgacctgtcccagctgggcggcgacgagggcgccgacaagcggacagccgacggcagcgagttcgagagccccaagaagaagcggaaggtg

SEQ ID NO: 462 - protein, 1368 aa, synthetic construct
MDKKYSIGLAIGTNSVGWAVITDEYKVPSKKFKVLGNTDRHSIKKNLIGALLFDSGETAEATRLKRTARRRYTRRKNRICYLQEIFSNEMAKVDDSFFHRLEESFLVEEDKKHERHPIFGNIVDEVAYHEKYPTIYHLRKKLVDSTDKADLRLIYLALAHMIKFRGHFLIEGDLNPDNSDVDKLFIQLVQTYNQLFEENPINASGVDAKAILSARLSKSRRLENLIAQLPGEKKNGLFGNLIALSLGLTPNFKSNFDLAEDAKLQLSKDTYDDDLDNLLAQIGDQYADLFLAAKNLSDAILLSDILRVNTEITKAPLSASMVKRYDEHHQDLTLLKALVRQQLPEKYKEIFFDQSKNGYAGYIDGGASQEEFYKFIKPILEKMDGTEELLVKLNREDLLRKQRTFDNGIIPHQIHLGELHAILRRQGDFYPFLKDNREKIEKILTFRIPYYVGPLARGNSRFAWMTRKSEETITPWNFEEVVDKGASAQSFIERMTNFDKNLPNEKVLPKHSLLYEYFTVYNELTKVKYVTEGMRKPAFLSGEQKKAIVDLLFKTNRKVTVKQLKEDYFKKIECFDSVEISGVEDRFNASLGTYHDLLKIIKDKDFLDNEENEDILEDIVLTLTLFEDREMIEERLKTYAHLFDDKVMKQLKRLRYTGWGRLSRKLINGIRDKQSGKTILDFLKSDGFANRNFMQLIHDDSLTFKEDIQKAQVSGQGDSLHEHIANLAGSPAIKKGILQTVKVVDELVKVMGGHKPENIVIEMARENQTTQKGQKNSRERMKRIEEGIKELGSQILKEHPVENTQLQNEKLYLYYLQNGRDMYVDQELDINRLSDYDVDHIVPQSFLKDDSIDNKVLTRSDKNRGKSDNVPSEEVVKKMKNYWRQLLNAKLITQRKFDNLTKAERGGLSELDKAGFIKRQLVETRQITKHVAQILDSRMNTKYDENDKLIREVKVITLKSKLVSDFRKDFQFYKVREINNYHHAHDAYLNAVVGTALIKKYPKLESEFVYGDYKVYDVRKMIAKSEQEIGKATAKYFFYSNIMNFFKTEITLANGEIRKRPLIETNGETGEIVWDKGRDFATVRKVLSMPQVNIVKKTEVQTGGFSKESILPKGNSDKLIARKKDWDPKKYGGFMQPTVAYSVLVVAKVEKGKSKKLKSVKELLGITIMERSSFEKNPIDFLEAKGYKEVKKDLIIKLPKYSLFELENGRKRMLASAKFLQKGNELALPSKYVNFLYLASHYEKLKGSPEDNEQKQLFVEQHKHYLDEIIEQISEFSKRVILADANLDKVLSAYNKHRDKPIREQAENIIHLFTLTNLGAPRAFKYFDTTIARKEYRSTKEVLDATLIHQSITGLYETRIDLSQLGGD

SEQ ID NO: 463 - protein, 1367 aa, synthetic construct
DKKYSIGLAIGTNSVGWAVITDEYKVPSKKFKVLGNTDRHSIKKNLIGALLFDSGETAEATRLKRTARRRYTRRKNRICYLQEIFSNEMAKVDDSFFHRLEESFLVEEDKKHERHPIFGNIVDEVAYHEKYPTIYHLRKKLVDSTDKADLRLIYLALAHMIKFRGHFLIEGDLNPDNSDVDKLFIQLVQTYNQLFEENPINASGVDAKAILSARLSKSRRLENLIAQLPGEKKNGLFGNLIALSLGLTPNFKSNFDLAEDAKLQLSKDTYDDDLDNLLAQIGDQYADLFLAAKNLSDAILLSDILRVNTEITKAPLSASMVKRYDEHHQDLTLLKALVRQQLPEKYKEIFFDQSKNGYAGYIDGGASQEEFYKFIKPILEKMDGTEELLVKLNREDLLRKQRTFDNGIIPHQIHLGELHAILRRQGDFYPFLKDNREKIEKILTFRIPYYVGPLARGNSRFAWMTRKSEETITPWNFEEVVDKGASAQSFIERMTNFDKNLPNEKVLPKHSLLYEYFTVYNELTKVKYVTEGMRKPAFLSGEQKKAIVDLLFKTNRKVTVKQLKEDYFKKIECFDSVEISGVEDRFNASLGTYHDLLKIIKDKDFLDNEENEDILEDIVLTLTLFEDREMIEERLKTYAHLFDDKVMKQLKRLRYTGWGRLSRKLINGIRDKQSGKTILDFLKSDGFANRNFMQLIHDDSLTFKEDIQKAQVSGQGDSLHEHIANLAGSPAIKKGILQTVKVVDELVKVMGGHKPENIVIEMARENQTTQKGQKNSRERMKRIEEGIKELGSQILKEHPVENTQLQNEKLYLYYLQNGRDMYVDQELDINRLSDYDVDHIVPQSFLKDDSIDNKVLTRSDKNRGKSDNVPSEEVVKKMKNYWRQLLNAKLITQRKFDNLTKAERGGLSELDKAGFIKRQLVETRQITKHVAQILDSRMNTKYDENDKLIREVKVITLKSKLVSDFRKDFQFYKVREINNYHHAHDAYLNAVVGTALIKKYPKLESEFVYGDYKVYDVRKMIAKSEQEIGKATAKYFFYSNIMNFFKTEITLANGEIRKRPLIETNGETGEIVWDKGRDFATVRKVLSMPQVNIVKKTEVQTGGFSKESILPKGNSDKLIARKKDWDPKKYGGFLQPTVAYSVLVVAKVEKGKSKKLKSVKELLGITIMERSSFEKNPIDFLEAKGYKEVKKDLIIKLPKYSLFELENGRKRMLASAKFLQKGNELALPSKYVNFLYLASHYEKLKGSPKDNEQKQLFVEQHKHYLDEIIEQISEFSKRVILDDANLDKVLSAYNKHRDKPIREQAENIIHLFTLTNLGAPRAFKYFDTTIARKEYKSTKEVLDATLIHQSITGLYETRIDLSQLGGD

SEQ ID NO: 464 - protein, 166 aa, synthetic construct
SEVEFSHEYWMRHALTLAKRARDEREVPVGAVLVLNNRVIGEGWNRAIGLHDPTAHAEIMALRQGGLVMQNYRLIDATLYVTFEPCVMCAGAMIHSRIGRVVFGVRNAKTGAAGSLMDVLHYPGMNHRVEITEGILADECAALLCYFFRMPRQVFNAQKKAQSSTD

SEQ ID NO: 465 - skipped

SEQ ID NO: 466 - RNA, 23 nt, synthetic construct
  source 1..23: mol_type = other RNA
accatcgacaagaaagggactga

SEQ ID NO: 467 - RNA, 22 nt, synthetic construct
  source 1..22: mol_type = other RNA
ccatcgacaagaaagggactga

SEQ ID NO: 468 - RNA, 41 nt, synthetic construct
  source 1..41: mol_type = other RNA
catcgacaagaaagggactgaatcgacaagaaagggactga

SEQ ID NO: 469 - RNA, 21 nt, synthetic construct
  source 1..21: mol_type = other RNA
catcgacaagaaagggactga

SEQ ID NO: 470-474 - skipped (5 entries)

SEQ ID NO: 475 - RNA, 99 nt, synthetic construct
  source 1..99: mol_type = other RNA
atcgacaagaaagggactgagttttagagctagaaatagcaagttaaaataaggctagtccgttatcaacttgaaaaagtggcaccgagtcggtgcttt

SEQ ID NO: 476-486 - skipped (11 entries)

SEQ ID NO: 487 - RNA, 100 nt, synthetic construct
  source 1..100: mol_type = other RNA
nnnnnnnnnnnnnnnnnnnngttttagagctagaaatagcaagttaaaataaggctagtccgttatcaacttgaaaaagtggcaccgagtcggtgctttt

SEQ ID NO: 488 - RNA, 109 nt, synthetic construct
  source 1..109: mol_type = other RNA
nnnnnnnnnnnnnnnnnnnnngttttagtactctgtaatgaaaattacagaatctactaaaacaaggcaaaatgccgtgtttatctcgtcaacttgttggcgagatttt

SEQ ID NO: 489 - RNA, 100 nt, synthetic construct; identical to SEQ ID NO: 487
  source 1..100: mol_type = other RNA

SEQ ID NO: 490 - RNA, 100 nt, synthetic construct; identical to SEQ ID NO: 487
  source 1..100: mol_type = other RNA

SEQ ID NO: 491 - RNA, 100 nt, synthetic construct; identical to SEQ ID NO: 487
  source 1..100: mol_type = other RNA

SEQ ID NO: 492 - skipped

SEQ ID NO: 493 - RNA, 106 nt, synthetic construct
  source 1..106: mol_type = other RNA
nnnnnnnnnnnnnnnnnnnngttttagagccggcggaaacgccggcaagttaaaataaggctagtccgttatcaacttgaaaaagtggcaccgagtcggtgctttt

SEQ ID NO: 494 - RNA, 106 nt, synthetic construct; identical to SEQ ID NO: 493
  source 1..106: mol_type = other RNA

SEQ ID NO: 495 - skipped

SEQ ID NO: 496 - RNA, 114 nt, synthetic construct
  source 1..114: mol_type = other RNA
nnnnnnnnnnnnnnnnnnnngttttagagccggcggaaacgccggcaagttaaaataaggctagtccgttatcaacttggacttcggtccaagtggcaccgagtcggtgctttt

SEQ ID NO: 497 - protein, 16 aa, synthetic construct
STDTTKDTSPKPQDKI

SEQ ID NO: 498 - protein, 16 aa, synthetic construct
STDANAHSDISTGDKI

SEQ ID NO: 499 - protein, 16 aa, synthetic construct
STDEDKRSDLGKQDKI

SEQ ID NO: 500 - protein, 16 aa, synthetic construct
STDEKDQQPNSTSDKI

SEQ ID NO: 501 - protein, 16 aa, synthetic construct
STDQKGQKIPSSNDKI

SEQ ID NO: 502 - protein, 16 aa, synthetic construct
STDDRSQKQDQQDDKI

SEQ ID NO: 503 - protein, 16 aa, synthetic construct
STDSKSVPLSSDGDKI

SEQ ID NO: 504 - protein, 16 aa, synthetic construct
STDRQPRKDNSSGDKI

SEQ ID NO: 505 - protein, 16 aa, synthetic construct
STDKEGDQPPPPKDKI

SEQ ID NO: 506 - protein, 16 aa, synthetic construct
STDDVEYYSRPPDDKI

SEQ ID NO: 507 - protein, 16 aa, synthetic construct
STDDPRKREIPPPDKI

SEQ ID NO: 508 - protein, 16 aa, synthetic construct
STDERQHSTPTTDDKI

SEQ ID NO: 509 - protein, 16 aa, synthetic construct
STDSSKQPENPPQDKI

SEQ ID NO: 510 - protein, 16 aa, synthetic construct
STDPGGAPETNSGDKI

SEQ ID NO: 511 - protein, 16 aa, synthetic construct
STDNISLSYDQQDDKI

SEQ ID NO: 512 - protein, 16 aa, synthetic construct
STDSKSQQFVTYEDKI

SEQ ID NO: 513 - protein, 16 aa, synthetic construct
STDLTESRPPQESDKI

SEQ ID NO: 514 - protein, 12 aa, synthetic construct
EGSSSKEEEEPG

SEQ ID NO: 515 - protein, 10 aa, synthetic construct
NSISSSNGQK

SEQ ID NO: 516 - protein, 12 aa, synthetic construct
GEEGEGSGGGEK

SEQ ID NO: 517 - protein, 12 aa, synthetic construct
EGEGGKESGSSE

SEQ ID NO: 518 - protein, 12 aa, synthetic construct
GGGGSSKSPGSE

SEQ ID NO: 519 - protein, 8 aa, synthetic construct
PIGSDQDD

SEQ ID NO: 520 - protein, 10 aa, synthetic construct
TEKGQVPHGS

SEQ ID NO: 521 - protein, 12 aa, synthetic construct
ESGEGGGGSEKK

SEQ ID NO: 522 - protein, 12 aa, synthetic construct
EEGKPKEGEGSG

SEQ ID NO: 523 - protein, 9 aa, synthetic construct
ASREPKDSS

SEQ ID NO: 524 - protein, 8 aa, synthetic construct
KQGSEHDE

SEQ ID NO: 525 - protein, 12 aa, synthetic construct
SESKSEKGSSEK

SEQ ID NO: 526 - protein, 10 aa, synthetic construct
QYDSGERSDQ

SEQ ID NO: 527 - protein, 10 aa, synthetic construct
PGANEEIPGQ

SEQ ID NO: 528 - protein, 7 aa, synthetic construct
NSPTDEK

SEQ ID NO: 529 - protein, 10 aa, synthetic construct
EGANEEIPGQ

SEQ ID NO: 530 - protein, 12 aa, synthetic construct
EGEKEKKKSGES

SEQ ID NO: 531 - protein, 10 aa, synthetic construct
PGRHEEVPGQ

SEQ ID NO: 532 - protein, 10 aa, synthetic construct
SKHQTEQDDS

SEQ ID NO: 533 - protein, 10 aa, synthetic construct
ESEDDSSGRK

SEQ ID NO: 534 - protein, 12 aa, synthetic construct
KESEKKESESKS

SEQ ID NO: 535 - protein, 10 aa, synthetic construct
KGEGKSSIKD

SEQ ID NO: 536 - protein, 10 aa, synthetic construct
DRSQKQDQQD

SEQ ID NO: 537 - protein, 8 aa, synthetic construct
GPSSTSSS

SEQ ID NO: 538 - protein, 12 aa, synthetic construct
GSSGEKEEGEPS

SEQ ID NO: 539 - protein, 12 aa, synthetic construct
GEPKSKKSGSGS

SEQ ID NO: 540 - protein, 12 aa, synthetic construct
SSGEGGKSESGP

SEQ ID NO: 541 - protein, 8 aa, synthetic construct
SPQPTSSD

SEQ ID NO: 542 - protein, 12 aa, synthetic construct
EGGSEEEEESGS

SEQ ID NO: 543 - protein, 19 aa, synthetic construct
CKRTADGSEFESPKKKRKV

SEQ ID NO: 544 - protein, 10 aa, synthetic construct
SKSQQFVTYE

SEQ ID NO: 545 - protein, 10 aa, synthetic construct
TGNSKYQTGK

SEQ ID NO: 546 - protein, 10 aa, synthetic construct
PQPIPHTNPT

SEQ ID NO: 547 - protein, 10 aa, synthetic construct
ANAHSDISTG

SEQ ID NO: 548 - protein, 10 aa, synthetic construct
KSQQTEDQSK

SEQ ID NO: 549 - protein, 10 aa, synthetic construct
QSQDQKQKEH

SEQ ID NO: 550 - protein, 8 aa, synthetic construct
NQQRPSSD

SEQ ID NO: 551 - protein, 10 aa, synthetic construct
TTKDTSPKPQ

SEQ ID NO: 552 - protein, 10 aa, synthetic construct
EGKDNQQTGE

SEQ ID NO: 553 - protein, 8 aa, synthetic construct
EPQPDSSE

SEQ ID NO: 554 - protein, 1368 aa, synthetic construct; identical to SEQ ID NO: 462

SEQ ID NO: 555 - protein, 1367 aa, synthetic construct; identical to SEQ ID NO: 463

SEQ ID NO: 556 - skipped

SEQ ID NO: 557 - protein, 1587 aa, synthetic construct; identical to SEQ ID NO: 446

SEQ ID NO: 558 - RNA, 103 nt, synthetic construct
  source 1..103: mol_type = other RNA
accatcgacaagaaagggactgagttttagagctagaaatagcaagttaaaataaggctagtccgttatcaacttgaaaaagtggcaccgagtcggtgctttt

SEQ ID NO: 559 - RNA, 22 nt, synthetic construct
  source 1..22: mol_type = other RNA
ccatcgacaagaaagggactga

SEQ ID NO: 560 - RNA, 21 nt, synthetic construct
  source 1..21: mol_type = other RNA
catcgacaagaaagggactga

SEQ ID NO: 561 - RNA, 20 nt, synthetic construct
  source 1..20: mol_type = other RNA
atcgacaagaaagggactga

SEQ ID NO: 562 - RNA, 19 nt, synthetic construct
  source 1..19: mol_type = other RNA
tcgacaagaaagggactga

SEQ ID NO: 563 - RNA, 18 nt, synthetic construct
  source 1..18: mol_type = other RNA
cgacaagaaagggactga

SEQ ID NO: 564 - RNA, 102 nt, synthetic construct
  source 1..102: mol_type = other RNA
ccatcgacaagaaagggactgagttttagagctagaaatagcaagttaaaataaggctagtccgttatcaacttgaaaaagtggcaccgagtcggtgctttt

SEQ ID NO: 565 - RNA, 101 nt, synthetic construct
  source 1..101: mol_type = other RNA
catcgacaagaaagggactgagttttagagctagaaatagcaagttaaaataaggctagtccgttatcaacttgaaaaagtggcaccgagtcggtgctttt

SEQ ID NO: 566 - RNA, 100 nt, synthetic construct
  source 1..100: mol_type = other RNA
atcgacaagaaagggactgagttttagagctagaaatagcaagttaaaataaggctagtccgttatcaacttgaaaaagtggcaccgagtcggtgctttt

SEQ ID NO: 567 - RNA, 99 nt, synthetic construct
  source 1..99: mol_type = other RNA
tcgacaagaaagggactgagttttagagctagaaatagcaagttaaaataaggctagtccgttatcaacttgaaaaagtggcaccgagtcggtgctttt

SEQ ID NO: 568 - RNA, 98 nt, synthetic construct
  source 1..98: mol_type = other RNA
cgacaagaaagggactgagttttagagctagaaatagcaagttaaaataaggctagtccgttatcaacttgaaaaagtggcaccgagtcggtgctttt

SEQ ID NO: 569 - RNA, 100 nt, synthetic construct; identical to SEQ ID NO: 566
  source 1..100: mol_type = other RNA

SEQ ID NO: 570 - protein, 100 aa, synthetic construct
AUCGACAAGAAAGGGACUGAGUUUUAGAGCUAGAAAUAGCAAGUUAAAAUAAGGCUAGUCCGUUAUCAACUUGAAAAAGUGGCACCGAGUCGGUGCUUUU

SEQ ID NO: 571 - RNA, 99 nt, synthetic construct; identical to SEQ ID NO: 475
  source 1..99: mol_type = other RNA

SEQ ID NO: 572 - RNA, 100 nt, synthetic construct; identical to SEQ ID NO: 566
  source 1..100: mol_type = other RNA

SEQ ID NO: 573 - RNA, 101 nt, synthetic construct; identical to SEQ ID NO: 565
  source 1..101: mol_type = other RNA

SEQ ID NO: 574 - RNA, 99 nt, synthetic construct; identical to SEQ ID NO: 475
  source 1..99: mol_type = other RNA

SEQ ID NO: 575 - RNA, 100 nt, synthetic construct; identical to SEQ ID NO: 566
  source 1..100: mol_type = other RNA

SEQ ID NO: 576 - RNA, 99 nt, synthetic construct; identical to SEQ ID NO: 475
  source 1..99: mol_type = other RNA

SEQ ID NO: 577 - RNA, 100 nt, synthetic construct; identical to SEQ ID NO: 566
  source 1..100: mol_type = other RNA

SEQ ID NO: 578 - RNA, 101 nt, synthetic construct; identical to SEQ ID NO: 565
  source 1..101: mol_type = other RNA

SEQ ID NO: 579 - RNA, 100 nt, synthetic construct; identical to SEQ ID NO: 566
  source 1..100: mol_type = other RNA

SEQ ID NO: 580 - RNA, 101 nt, synthetic construct; identical to SEQ ID NO: 565
  source 1..101: mol_type = other RNA

SEQ ID NO: 581 - RNA, 101 nt, synthetic construct; identical to SEQ ID NO: 565
  source 1..101: mol_type = other RNA

SEQ ID NO: 582 - RNA, 106 nt, synthetic construct
  source 1..106: mol_type = other RNA
atcgacaagaaagggactgagttttagagccggcggaaacgccggcaagttaaaataaggctagtccgttatcaacttgaaaaagtggcaccgagtcggtgctttt

SEQ ID NO: 583 - RNA, 106 nt, synthetic construct; identical to SEQ ID NO: 582
  source 1..106: mol_type = other RNA

SEQ ID NO: 584 - RNA, 108 nt, synthetic construct
  source 1..108: mol_type = other RNA
atcgacaagaaagggactgagttttagagctagaaatagcaagttaaaataaggctagtccgttatcaacttggacttcggtccaagtggcaccgagtcggtgctttt

SEQ ID NO: 585 - RNA, 114 nt, synthetic construct
  source 1..114: mol_type = other RNA
atcgacaagaaagggactgagttttagagccggcggaaacgccggcaagttaaaataaggctagtccgttatcaacttggacttcggtccaagtggcaccgagtcggtgctttt

SEQ ID NO: 586-587 - skipped (2 entries)

SEQ ID NO: 588 - protein, 1587 aa, synthetic construct; identical to SEQ ID NO: 446

SEQ ID NO: 589 - protein, 167 aa, synthetic construct
MSEVEFSHEYWMRHALTLAKRARDEREVPVGAVLVHNNRVIGEGWNRAIGLHDPTAHAEIMALRQGGLVMQNYRLYDATLYTTFEPCVMCAGAMIHSRIGRVVFGVRNAKTGAAGSLMDVLHYPGMNHRVEITEGILADECAALLCTFFRMPRSVFKAQKKAQSSTD

SEQ ID NO: 590 - protein, 1368 aa, synthetic construct; identical to SEQ ID NO: 462

SEQ ID NO: 591 - skipped

SEQ ID NO: 592 - DNA, 3184 bp, Homo sapiens
  source 1..3184: mol_type = other DNA
acaatgactcctttcggtaagtgcagtggaagctgtacactgcccaggcaaagcgtccgggcagcgtaggcgggcgactcagatcccagccagtggacttagcccctgtttgctcctccgataactggggtgaccttggttaatattcaccagcagcctcccccgttgcccctctggatccactgcttaaatacggacgaggacagggccctgtctcctcagcttcaggcaccaccactgacctgggacagtgaatcgacaatgccgtcttctgtctcgtggggcatcctcctgctggcaggcctgtgctgcctggtccctgtctccctggctgaggatccccagggagatgctgcccagaagacagatacatcccaccatgatcaggatcacccaaccttcaacaagatcacccccaacctggctgagttcgccttcagcctataccgccagctggcacaccagtccaacagcaccaatatcttcttctccccagtgagcatcgctacagcctttgcaatgctctccctggggaccaaggctgacactcacgatgaaatcctggagggcctgaatttcaacctcacggagattccggaggctcagatccatgaaggcttccaggaactcctccgtaccctcaaccagccagacagccagctccagctgaccaccggcaatggcctgttcctcagcgagggcctgaagctagtggataagtttttggaggatgttaaaaagttgtaccactcagaagccttcactgtcaacttcggggacaccgaagaggccaagaaacagatcaacgattacgtggagaagggtactcaagggaaaattgtggatttggtcaaggagcttgacagagacacagtttttgctctggtgaattacatcttctttaaaggcaaatgggagagaccctttgaagtcaaggacaccgaggaagaggacttccacgtggaccaggtgaccaccgtgaaggtgcctatgatgaagcgtttaggcatgtttaacatccagcactgtaagaagctgtccagctgggtgctgctgatgaaatacctgggaatgccaccgccatcttcttcctgcctgatgaggggaaactacagcacctggaaaatgactcacccacgatatcatcaccaagttcctggaaaatgaagacagaaggtctgccagcttcatttacccaaactgtccattactggaacctatgatctgaagagcgtcctgggtcaactggcatcactaaggtcttcagcaatggggctgacctctccggggtcacagaggaggcaccctgaagctctccaaggccgtgcataaggctgtgctgaccatcgacgagaaagggactgagctgctggggccatgtttttagaggccatacccatgtctatcccccccgaggtcaagttaacaaaccctttgtcttcttaatgattgaacaaaataccaagtctcccctcttcatgggaaagtggtgaatcccacccaaaaataactgcctctcgctcctcaacccctcccctccatcctggccccctccctggatgacattaaagaagggttgagctggtccctgcctgcatgtgctgtaaatccctcccatgttttctctgagtctccctttgcctgctgaggctgtatgtggctccaggtaacagtgctgtcttcgggccccctgaactgtgttcatggagcatctggctggtaggcacatgctgggcttgaatccaggggggactgaatcctcagcttacggacctgggccatctgtttctggagggctccagtcttccttgtcctgtcttggagtccccaagaaggatcacaggggaggaaccagataccagccatgaccccaggctccaccaagcatcttcatgtcccctgctcatcccccactcccccccacccagagttgctcatcctgccagggctggctggcccaccccaaggctgccctcctgggggccccagaactgcctgatcgtgccgtggcccattttgtggcatctgcagcaacacaagagagaggacaatgtcctcctcttgacccgctgtacctaaccagactcgggccctgcacctctcaggcacttctggaaaatgactgaggcagatcttcctgaagcccattctccatggggcaacaaggacacctattctgtccttgtccttcatcgctgccccagaaagcctcacatatctccgtttagaatcaggtcccttctccccagagaagaggagggtctctgctttgttttctctatctcctcctcagacttgaccaggcccagaggccccagaagaccattaccctatatcccttctcctccctagtcacatggccataggctgctgatggctcaggaaggccattgcaaggactcctcagctatgggagaggaagcacatacccattgacccccgcaacccctccctttcctcctctgagtcccgactggggccacatgagcctgacttctttgtgcctgttgctgtccctgcagtcttcagagggccaccgcagctcagtgccacggcaggaggctgttcctgaatagcccctgtggtaagggccaggagagtcctccatcctccaaggccctgctaaaggacacagcagccaggaagtcccctgggcccctagcgaaggacagcctgctccctccgtctctaccaggaatggccttgtcctatggaaggcactccccatcccaaactaatctaggaatcactgtctaaccactcactgtcatgaatgtgtactaaaggatgaggttgagtcataccaaatagtgatttcgatagttcaaaatggtgaaattgcaattctacatgattcagtctaatcaatggataccgactgtttcccacacaagtctccgttctcttaagcttactcactgacagcctttcactctccacaaatacattaaagatatgccatcaccaagccccctaggatgacaccagacctgagagtctgaagacctggatccaagtctgacttttccccctgacagctgtgtgaccttcgtgaagtcgccaaacctctctgagcccagtcattgctagtaagacctgcctttgagttggtatgatgttcaagttagataacaaatgtttatacccattagaacagagaataaatagaactacatttcttgca

SEQ ID NO: 593 - DNA, 28 bp, synthetic construct
  source 1..28: mol_type = other DNA
atcgacaagaaagggactgaagctgctg

SEQ ID NO: 594 - protein, 9 aa, synthetic construct
IDKKGTEAA

What is claimed:

1. A base editor comprising a nucleic acid programmable DNA binding protein (napDNAbp) domain and an adenosine deaminase domain,
wherein the polynucleotide programmable DNA binding domain variant comprises an alteration selected from the group consisting of M1135L, E1250K, A1283D, Q1136Y, R1337K, R765A, and Q768A of an amino acid sequence, or a fragment thereof lacking an N-terminal methionine, that is at least 80%, 85%, 90%, 95%, 96%, 97%, 98%, 99% or 100% identical to:
(SEQ ID NO: 554)
MDKKYSIGLAIGTNSVGWAVITDEYKVPSKKFKVLGNTDRHSIKKNLIGA
LLFDSGETAEATRLKRTARRRYTRRKNRICYLQEIFSNEMAKVDDSFFHR
LEESFLVEEDKKHERHPIFGNIVDEVAYHEKYPTIYHLRKKLVDSTDKAD
LRLIYLALAHMIKFRGHFLIEGDLNPDNSDVDKLFIQLVQTYNQLFEENP
INASGVDAKAILSARLSKSRRLENLIAQLPGEKKNGLFGNLIALSLGLTP
NFKSNFDLAEDAKLQLSKDTYDDDLDNLLAQIGDQYADLFLAAKNLSDAI
LLSDILRVNTEITKAPLSASMVKRYDEHHQDLTLLKALVRQQLPEKYKEI
FFDQSKNGYAGYIDGGASQEEFYKFIKPILEKMDGTEELLVKLNREDLLR
KQRTFDNGIIPHQIHLGELHAILRRQGDFYPFLKDNREKIEKILTFRIPY
YVGPLARGNSRFAWMTRKSEETITPWNFEEVVDKGASAQSFIERMTNFDK
NLPNEKVLPKHSLLYEYFTVYNELTKVKYVTEGMRKPAFLSGEQKKAIVD
LLFKTNRKVTVKQLKEDYFKKIECFDSVEISGVEDRFNASLGTYHDLLKI
IKDKDFLDNEENEDILEDIVLTLTLFEDREMIEERLKTYAHLFDDKVMKQ
LKRLRYTGWGRLSRKLINGIRDKQSGKTILDFLKSDGFANRNFMQLIHDD
SLTFKEDIQKAQVSGQGDSLHEHIANLAGSPAIKKGILQTVKVVDELVKV
MGGHKPENIVIEMARENQTTQKGQKNSRERMKRIEEGIKELGSQILKEHP
VENTQLQNEKLYLYYLQNGRDMYVDQELDINRLSDYDVDHIVPQSFLKDD
SIDNKVLTRSDKNRGKSDNVPSEEVVKKMKNYWRQLLNAKLITQRKFDNL
TKAERGGLSELDKAGFIKRQLVETRQITKHVAQILDSRMNTKYDENDKLI
REVKVITLKSKLVSDFRKDFQFYKVREINNYHHAHDAYLNAVVGTALIKK
YPKLESEFVYGDYKVYDVRKMIAKSEQEIGKATAKYFFYSNIMNFFKTEI
TLANGEIRKRPLIETNGETGEIVWDKGRDFATVRKVLSMPQVNIVKKTEV
QTGGFSKESILPKGNSDKLIARKKDWDPKKYGGFMQPTVAYSVLVVAKVE
KGKSKKLKSVKELLGITIMERSSFEKNPIDFLEAKGYKEVKKDLIIKLPK
YSLFELENGRKRMLASAKFLQKGNELALPSKYVNFLYLASHYEKLKGSPE
DNEQKQLFVEQHKHYLDEIIEQISEFSKRVILADANLDKVLSAYNKHRDK
PIREQAENIIHLFTLTNLGAPRAFKYFDTTIARKEYRSTKEVLDATLIHQ
SITGLYETRIDLSQLGGD
or a corresponding amino acid sequence.

2. The base editor of claim 1, wherein the napDNAbp comprises one, two, three, four, five or six amino acid alterations selected from the group consisting of M1135L, E1250K, A1283D, Q1136Y, R1337K, R765A, and Q768A.

3. The base editor of claim 1, wherein the napDNAbp comprises a combination of amino acid alterations selected from the group consisting of:
R1337K;
Q1136Y, and R1337K;
M1135L, Q1136Y, and R1337K;
Q1136Y, and R1337K;
M1135L, Q1136Y, and R1337K;
M1135L, A1283D, Q1136Y, and R1337K;
M1135L, A1283D, E1250K, and R1337K;
A1283D, E1250K, and Q1136Y;
M1135L, A1283D, Q1136Y, and R1337K;
M1135L, A1283D, Q1136Y, R1337K, R765A, and Q768A; and
A1283D, E1250K, and Q1136Y.

4. The base editor of claim 2, wherein the napDNAbp comprises the following amino acid sequence:
Variant G
(SEQ ID NO: 555)
DKKYSIGLAIGTNSVGWAVITDEYKVPSKKFKVLGNTDRHSIKKNLIGAL
LFDSGETAEATRLKRTARRRYTRRKNRICYLQEIFSNEMAKVDDSFFHRL
EESFLVEEDKKHERHPIFGNIVDEVAYHEKYPTIYHLRKKLVDSTDKADL
RLIYLALAHMIKFRGHFLIEGDLNPDNSDVDKLFIQLVQTYNQLFEENPI
NASGVDAKAILSARLSKSRRLENLIAQLPGEKKNGLFGNLIALSLGLTPN
FKSNFDLAEDAKLQLSKDTYDDDLDNLLAQIGDQYADLFLAAKNLSDAIL
LSDILRVNTEITKAPLSASMVKRYDEHHQDLTLLKALVRQQLPEKYKEIF
FDQSKNGYAGYIDGGASQEEFYKFIKPILEKMDGTEELLVKLNREDLLRK
QRTFDNGIIPHQIHLGELHAILRRQGDFYPFLKDNREKIEKILTFRIPYY
VGPLARGNSRFAWMTRKSEETITPWNFEEVVDKGASAQSFIERMTNFDKN
LPNEKVLPKHSLLYEYFTVYNELTKVKYVTEGMRKPAFLSGEQKKAIVDL
LFKTNRKVTVKQLKEDYFKKIECFDSVEISGVEDRFNASLGTYHDLLKII
KDKDFLDNEENEDILEDIVLTLTLFEDREMIEERLKTYAHLFDDKVMKQL
KRLRYTGWGRLSRKLINGIRDKQSGKTILDFLKSDGFANRNFMQLIHDDS
LTFKEDIQKAQVSGQGDSLHEHIANLAGSPAIKKGILQTVKVVDELVKVM
GGHKPENIVIEMARENQTTQKGQKNSRERMKRIEEGIKELGSQILKEHPV
ENTQLQNEKLYLYYLQNGRDMYVDQELDINRLSDYDVDHIVPQSFLKDDS
IDNKVLTRSDKNRGKSDNVPSEEVVKKMKNYWRQLLNAKLITQRKFDNLT
KAERGGLSELDKAGFIKRQLVETRQITKHVAQILDSRMNTKYDENDKLIR
EVKVITLKSKLVSDFRKDFQFYKVREINNYHHAHDAYLNAVVGTALIKKY
PKLESEFVYGDYKVYDVRKMIAKSEQEIGKATAKYFFYSNIMNFFKTEIT
LANGEIRKRPLIETNGETGEIVWDKGRDFATVRKVLSMPQVNIVKKTEVQ
TGGFSKESILPKGNSDKLIARKKDWDPKKYGGFLQPTVAYSVLVVAKVEK
GKSKKLKSVKELLGITIMERSSFEKNPIDFLEAKGYKEVKKDLIIKLPKY
SLFELENGRKRMLASAKFLQKGNELALPSKYVNFLYLASHYEKLKGSPKD
NEQKQLFVEQHKHYLDEIIEQISEFSKRVILDDANLDKVLSAYNKHRDKP
IREQAENIIHLFTLTNLGAPRAFKYFDTTIARKEYKSTKEVLDATLIHQS
ITGLYETRIDLSQLGGD.

5. The base editor of claim 1, wherein the adenosine deaminase domain comprises an amino acid sequence that is at least 80%, 85%, 90%, 95%, 96%, 97%, 98%, 99%, or 100% identical to the following amino acid sequence:
(SEQ ID NO: 426)
SEVEFSHEYWMRHALTLAKRARDEREVPVGAVLVHNNRVIGEGWNRAIG
LHDPTAHAEIMALRQGGLVMQNYRLYDATLYTTFEPCVMCAGAMIHSRI
GRVVFGVRNAKTGAAGSLMDVLHYPGMNHRVEITEGILADECAALLCTF
FRMPRSVFKAQKKAQSSTD.

6. A base editor system comprising the base editor of claim 1, or one or more polynucleotides encoding the base editor, and a guide polynucleotide, or a polynucleotide encoding the guide polynucleotide.

7. The base editor system of claim 6, wherein the guide polynucleotide comprises a spacer comprising a nucleotide sequence selected from the group consisting of:
5′-ACCAUCGACAAGAAAGGGACUGA-3′ (SEQ ID NO: 466);
5′-CCAUCGACAAGAAAGGGACUGA-3′ (SEQ ID NO: 559);
5′-CAUCGACAAGAAAGGGACUGA-3′ (SEQ ID NO: 560);
5′-AUCGACAAGAAAGGGACUGA-3′ (SEQ ID NO: 561);
5′-UCGACAAGAAAGGGACUGA-3′ (SEQ ID NO: 562); and
5′-CGACAAGAAAGGGACUGA-3′ (SEQ ID NO: 563); and wherein the guide polynucleotide comprises a scaffold comprising a nucleotide sequence that is at least 90%, 95%, 96%, 97%, 98%, 99%, or 100% identical to the following nucleotide sequence:
(SEQ ID NO: 324)
5′-GUUUUAGAGC UAGAAAUAGC AAGUUAAAAU AAGGCUAGUC
CGUUAUCAAC UUGAAAAAGU GGCACCGAGU CGGUGCUUUU-3′.

8. The base editor system of claim 6, wherein the guide polynucleotide comprises a nucleotide sequence, from 5′ to 3′, selected from the group consisting of: mAsmUsmCsGACAAGAAAGGGACUGAGUUUUAGAGCUAGAAAUAGCAAGUUAAAAUAAGGCU AGUCCGUUAUCAACUUGAAAAAGUGGCACCGAGUCGGUGCmUsmUsmUsU (SEQ ID NO: 569); mAsmUsmCsGACAAGAAAGGGACUGAGUUUUAGAGCUAGAAAUAGCAAGUUAAAAUAAGGCU AGUCCGUUAUCAACUUGAAAAAGUGGCACCGAGUCGGUGCUsmUsmUsmU (SEQ ID NO: 570), wherein the guide is covalently linked at the 3′ end to a peptide with the amino acid sequence
(SEQ ID NO: 543)
CKRTADGSEFESPKKKRKV;
(SEQ ID NO: 571)
mAsmUsmCsmGmAmCmAmAmGmAfAfAfGfGGsAsfCfUGsmAmGUsUs
UsfUfAmGmAmGmCmUmAmGmAmAmAmUmAmGmCmAmAmGUUmAAmAmA
UmAmAmGmGCUmAGUCmCGUUmAmUmCmAmAmCmUmUmGmAmAmAmAmA
mGmUmGmGmCmAmCmCmGmAmGmUmCmGmGmUmGmCsmUsmUsmU;
(SEQ ID NOs: 572)
mAsmUsmCsGACAAGAAAGGGACUGAmGUUUUAGmAmGmCmUmAmGmAm
AmAmUmAmGmCmAmAGUUmAAmAAmUAmAmGmGmCmUmAGUmCmCGUUA
mUmCAAmCmUmUmGmAmAmAmAmAmGmUmGGmCmAmCmCmGmAmGmUmC
mGmGmUmGmCmUsmUsmUsmU;
(SEQ ID NOs: 573)
mCsmAsmUsCGACAAGAAAGGGACUGAGUUUUAGAGCUAGAAAUAGCAA
GUUAAAAUAAGGCUAGUCCGUUAUCAACUUGAAAAAGUGGCACCGAGUC
GGUGCmUsmUsmUsU;
(SEQ ID NOs: 574)
mAsmUsmCsmGmAmCmAmAmGmAfAfAfGfGGsAsfCUGmAmGUSUUfU
fAmGmAmGmCmUmAmGmAmAmAmUmAmGmCmAmAmGUUmAAmAmAUmAm
AmGmGCUmAGUCmCGUUmAmUmCmAmAmCmUmUmGmAmAmAmAmAmGUG
mGmCmAmCmCmGmAmGmUmCmGmGmUmGmCsmUsmUsmU;
(SEQ ID NOs: 575)
mAsmUsmCsGACAAGAAAGGGACUGAmGUUUUAGmAmGmCmUmAmGmAm
AmAmUmAmGmCmAmAGUUmAAmAAmUAmAmGmGmCmUmAGUmCmCGUUA
mUmCAAmCmUmUmGmAmAmAmAmAmGUGGmCmAmCmCmGmAmGmUmCmG
mGmUmGmCmUsmUsmUsmU;
(SEQ ID NOs: 576)
5′mAsmUsmCsmGmAmCmAmAmGmAAAGGGACUGmAmGUUUUAmGmAmG
mCmUmAmGmAmAmAmUmAmGmCmAmAmGUUmAAmAmAUmAmAmGmGCUm
AGUCmCGUUmAmUmCmAmAmCmUmUmGmAmAmAmAmAmGUGmGmCmAmC
mCmGmAmGmUmCmGmGmUmGmCsmUsmUsmU;
(SEQ ID NOs: 577)
mAsmUsmCsmGmAmCmAmAmGmAAAGGGACUGAmGUUUUAGmAmGmCmU
mAmGmAmAmAmUmAmGmCmAmAGUUmAAmAAmUAmAmGmGmCmUmAGUm
CmCGUUAmUmCAAmCmUmUmGmAmAmAmAmAmGUGGmCmAmCmCmGmAm
GmUmCmGmGmUmGmCmUsmUsmUsmU;
(SEQ ID NOs: 578)
mCsmAsmUsmCmGmAmCmAmAmGmAAAGGGACUGAmGUUUUAGmAmGmC
mUmAmGmAmAmAmUmAmGmCmAmAGUUmAAmAAmUAmAmGmGmCmUmAG
UmCmCGUUAmUmCAAmCmUmUmGmAmAmAmAmAmGUGGmCmAmCmCmGm
AmGmUmCmGmGmUmGmCmUsmUsmUsmU;
(SEQ ID NOs: 579)
mAsmUsmCsmGmAmCmAmAmGmAmAAmGmGGAmCUGmAmGUUUUAGmAm
GmCmUmAmGmAmAmAmUmAmGmCmAmAGUUmAAmAAmUAmAmGmGmCmU
mAGUmCmCGUUAmUmCAAmCmUmUmGmAmAmAmAmAmGUGGmCmAmCmC
mGmAmGmUmCmGmGmUmGmCmUsmUsmUsmU;
(SEQ ID NOs: 580)
mCsmAsmUsmCmGmAmCmAmAmGmAmAAmGmGGAmCUGmAmGUUUUAGm
AmGmCmUmAmGmAmAmAmUmAmGmCmAmAGUUmAAmAAmUAmAmGmGmC
mUmAGUmCmCGUUAmUmCAAmCmUmUmGmAmAmAmAmAmGUGGmCmAmC
mCmGmAmGmUmCmGmGmUmGmCmUsmUsmUsmU;
(SEQ ID NOs: 581)
mCsmAsmUsCGACAAGAAAGGGACUGAmGUUUUAGmAmGmCmUmAmGmA
mAmAmUmAmGmCmAmAGUUmAAmAAmUAmAmGmGmCmUmAGUmCmCGUU
AmUmCAAmCmUmUmGmAmAmAmAmAmGUGGmCmAmCmCmGmAmGmUmCm
GmGmUmGmCmUsmUsmUsmU;
and
(SEQ ID NOs: 582)
mAsmUsmCsGACAAGAAAGGGACUGAGUUUUAGAmGmCmCmGmGmCmGm
GmAmAmAmCmGmCmCmGmGmCAAGUUAAAAUAAGGCUAGUCCGUUAUCA
mAmCmUmUmGmAmAmAmAmAmGmUmGmGmCmAmCmCmGmAmGmUmCmGm
GmUmGmCmUsmUsmUsmU;
(SEQ ID NOs: 583)
mAsmUsmCsmGmAmCmAmAmGmAAAGGGACUGAGUUUUAGAmGmCmCmG
mGmCmGmGmAmAmAmCmGmCmCmGmGmCAAGUUAAAAUAAGGCUAGUCC
GUUAUCAmAmCmUmUmGmAmAmAmAmAmGmUmGmGmCmAmCmCmGmAmG
mUmCmGmGmUmGmCmUsmUsmUsmU;
(SEQ ID NOs: 584)
mAsmUsmCsGACAAGAAAGGGACUGAGUUUUAGAmGmCmUmAmGmAmAm
AmUmAmGmCAAGUUAAAAUAAGGCUAGUCCGUUAmUmCAAmCmUmUGGA
CUUCGGUCCmAmAmGmUmGGmCmAmCmCmGmAmGmUmCmGmGmUmGmCm
UsmUsmUsmU;
or
(SEQ ID NO: 585)
mAsmUsmCsGACAAGAAAGGGACUGAGUUUUAGAmGmCmCmGmGmCmGm
GmAmAmAmCmGmCmCmGmGmCAAGUUAAAAUAAGGCUAGUCCGUUAmUm
CAAmCmUmUGGACUUCGGUCCmAmAmGmUmGGmCmAmCmCmGmAmGmUm
CmGmGmUmGmCmUmUmUmU;
wherein “N” represents any nucleotide, “mN” indicates a 2′-OMe modification of the nucleotide “N”, fN indicates a 2′-fluoro(F) modification of the nucleotide “N,” and “Ns” indicates that the nucleotide “N” is linked to the following nucleotide by a phosphorothioate.

9. A guide polynucleotide, or a polynucleotide encoding the guide polynucleotide, wherein the guide polynucleotide comprises a nucleotide sequence selected from the group consisting of
5′-ACCAUCGACAAGAAAGGGACUGA-3′ (SEQ ID NO: 466);
5′-CCAUCGACAAGAAAGGGACUGA-3′ (SEQ ID NO: 559);
5′-CAUCGACAAGAAAGGGACUGA-3′ (SEQ ID NO: 560);
5′-AUCGACAAGAAAGGGACUGA-3′ (SEQ ID NO: 561);
5′-UCGACAAGAAAGGGACUGA-3′ (SEQ ID NO: 562);
5′-CGACAAGAAAGGGACUGA-3′ (SEQ ID NO: 563);
′-GUUUUAGAGC UAGAAAUAGC AAGUUAAAAU AAGGCUAGUC CGUUAUCAAC UUGAAAAAGU GGCACCGAGU CGGUGCUUUU-3′ (SEQ ID NO: 324);
5′-ACCAUCGACAAGAAAGGGACUGA GUUUUAGAGC UAGAAAUAGC AAGUUAAAAU AAGGCUAGUC CGUUAUCAAC UUGAAAAAGU GGCACCGAGU CGGUGCUUUU-3′ (SEQ ID NO: 558);
5′-CCAUCGACAAGAAAGGGACUGA GUUUUAGAGC UAGAAAUAGC AAGUUAAAAU AAGGCUAGUC CGUUAUCAAC UUGAAAAAGU GGCACCGAGU CGGUGCUUUU-3′ (SEQ ID NO: 564);
5′-CAUCGACAAGAAAGGGACUGA GUUUUAGAGC UAGAAAUAGC AAGUUAAAAU AAGGCUAGUC CGUUAUCAAC UUGAAAAAGU GGCACCGAGU CGGUGCUUUU-3′ (SEQ ID NO: 565);
5′-AUCGACAAGAAAGGGACUGA GUUUUAGAGC UAGAAAUAGC AAGUUAAAAU AAGGCUAGUC CGUUAUCAAC UUGAAAAAGU GGCACCGAGU CGGUGCUUUU-3′ (SEQ ID NO: 566);
5′-UCGACAAGAAAGGGACUGA GUUUUAGAGC UAGAAAUAGC AAGUUAAAAU AAGGCUAGUC CGUUAUCAAC UUGAAAAAGU GGCACCGAGU CGGUGCUUUU-3′ (SEQ ID NO: 567); and
5′-CGACAAGAAAGGGACUGA GUUUUAGAGC UAGAAAUAGC AAGUUAAAAU AAGGCUAGUC CGUUAUCAAC UUGAAAAAGU GGCACCGAGU CGGUGCUUUU-3′ (SEQ ID NO: 568);
mAsmUsmCsGACAAGAAAGGGACUGAGUUUUAGAGCUAGAAAUAGCAAG UUAAAAUAAGGCUAGUCCGUUAUCAACUUGAAAAAGUGGCACCGAGUC GGUGCmUsmUsmUsU (SEQ ID NO: 569);
mAsmUsmCsGACAAGAAAGGGACUGAGUUUUAGAGCUAGAAAUAGCAAGUUAAAAUA AGGCUAGUCCGUUAUCAACUUGAAAAAGUGGCACCGAGUCGGUGCUsmUsmUsmU (SEQ ID NO: 570), wherein the guide is covalently linked at the 3′ end to a peptide with the amino acid sequence
(SEQ ID NO: 543)
CKRTADGSEFESPKKKRKV;
(SEQ ID NO: 571)
mAsmUsmCsmGmAmCmAmAmGmAfAfAfGfGGsAsfCfUGsmAmGUsUs
UsfUfAmGmAmGmCmUmAmGmAmAmAmUmAmGmCmAmAmGUUmAAmAmA
UmAmAmGmGCUmAGUCmCGUUmAmUmCmAmAmCmUmUmGmAmAmAmAmA
mGmUmGmGmCmAmCmCmGmAmGmUmCmGmGmUmGmCsmUsmUsmU;
(SEQ ID NO: 572)
mAsmUsmCsGACAAGAAAGGGACUGAmGUUUUAGmAmGmCmUmAmGmAm
AmAmUmAmGmCmAmAGUUmAAmAAmUAmAmGmGmCmUmAGUmCmCGUUA
mUmCAAmCmUmUmGmAmAmAmAmAmGmUmGGmCmAmCmCmGmAmGmUmC
mGmGmUmGmCmUsmUsmUsmU;
(SEQ ID NO: 573)
mCsmAsmUsCGACAAGAAAGGGACUGAGUUUUAGAGCUAGAAAUAGCAA
GUUAAAAUAAGGCUAGUCCGUUAUCAACUUGAAAAAGUGGCACCGAGUC
GGUGCmUsmUsmUsU;
(SEQ ID NO: 574)
mAsmUsmCsmGmAmCmAmAmGmAfAfAfGfGGsAsfCUGmAmGUSUUfU
fAmGmAmGmCmUmAmGmAmAmAmUmAmGmCmAmAmGUUmAAmAmAUmAm
AmGmGCUmAGUCmCGUUmAmUmCmAmAmCmUmUmGmAmAmAmAmAmGUG
mGmCmAmCmCmGmAmGmUmCmGmGmUmGmCsmUsmUsmU;
(SEQ ID NO: 575)
mAsmUsmCsGACAAGAAAGGGACUGAmGUUUUAGmAmGmCmUmAmGmAm
AmAmUmAmGmCmAmAGUUmAAmAAmUAmAmGmGmCmUmAGUmCmCGUUA
mUmCAAmCmUmUmGmAmAmAmAmAmGUGGmCmAmCmCmGmAmGmUmCmG
mGmUmGmCmUsmUsmUsmU;
(SEQ ID NO: 576)
5′mAsmUsmCsmGmAmCmAmAmGmAAAGGGACUGmAmGUUUUAmGmAmG
mCmUmAmGmAmAmAmUmAmGmCmAmAmGUUmAAmAmAUmAmAmGmGCUm
AGUCmCGUUmAmUmCmAmAmCmUmUmGmAmAmAmAmAmGUGmGmCmAmC
mCmGmAmGmUmCmGmGmUmGmCsmUsmUsmU;
(SEQ ID NO: 577)
mAsmUsmCsmGmAmCmAmAmGmAAAGGGACUGAmGUUUUAGmAmGmCmU
mAmGmAmAmAmUmAmGmCmAmAGUUmAAmAAmUAmAmGmGmCmUmAGUm
CmCGUUAmUmCAAmCmUmUmGmAmAmAmAmAmGUGGmCmAmCmCmGmAm
GmUmCmGmGmUmGmCmUsmUsmUsmU;
(SEQ ID NO: 578)
mCsmAsmUsmCmGmAmCmAmAmGmAAAGGGACUGAmGUUUUAGmAmGmC
mUmAmGmAmAmAmUmAmGmCmAmAGUUmAAmAAmUAmAmGmGmCmUmAG
UmCmCGUUAmUmCAAmCmUmUmGmAmAmAmAmAmGUGGmCmAmCmCmGm
AmGmUmCmGmGmUmGmCmUsmUsmUsmU;
(SEQ ID NO: 579)
mAsmUsmCsmGmAmCmAmAmGmAmAAmGmGGAmCUGmAmGUUUUAGmAm
GmCmUmAmGmAmAmAmUmAmGmCmAmAGUUmAAmAAmUAmAmGmGmCmU
mAGUmCmCGUUAmUmCAAmCmUmUmGmAmAmAmAmAmGUGGmCmAmCmC
mGmAmGmUmCmGmGmUmGmCmUsmUsmUsmU;
(SEQ ID NO: 580)
mCsmAsmUsmCmGmAmCmAmAmGmAmAAmGmGGAmCUGmAmGUUUUAGm
AmGmCmUmAmGmAmAmAmUmAmGmCmAmAGUUmAAmAAmUAmAmGmGmC
mUmAGUmCmCGUUAmUmCAAmCmUmUmGmAmAmAmAmAmGUGGmCmAmC
mCmGmAmGmUmCmGmGmUmGmCmUsmUsmUsmU;
(SEQ ID NO: 581)
mCsmAsmUsCGACAAGAAAGGGACUGAmGUUUUAGmAmGmCmUmAmGmA
mAmAmUmAmGmCmAmAGUUmAAmAAmUAmAmGmGmCmUmAGUmCmCGUU
AmUmCAAmCmUmUmGmAmAmAmAmAmGUGGmCmAmCmCmGmAmGmUmCm
GmGmUmGmCmUsmUsmUsmU;
(SEQ ID NO: 582)
mAsmUsmCsGACAAGAAAGGGACUGAGUUUUAGAmGmCmCmGmGmCmGm
GmAmAmAmCmGmCmCmGmGmCAAGUUAAAAUAAGGCUAGUCCGUUAUCA
mAmCmUmUmGmAmAmAmAmAmGmUmGmGmCmAmCmCmGmAmGmUmCmGm
GmUmGmCmUsmUsmUsmU;
(SEQ ID NO: 583)
mAsmUsmCsmGmAmCmAmAmGmAAAGGGACUGAGUUUUAGAmGmCmCmG
mGmCmGmGmAmAmAmCmGmCmCmGmGmCAAGUUAAAAUAAGGCUAGUCC
GUUAUCAmAmCmUmUmGmAmAmAmAmAmGmUmGmGmCmAmCmCmGmAmG
mUmCmGmGmUmGmCmUsmUsmUsmU;
(SEQ ID NO: 584)
mAsmUsmCsGACAAGAAAGGGACUGAGUUUUAGAmGmCmUmAmGmAmAm
AmUmAmGmCAAGUUAAAAUAAGGCUAGUCCGUUAmUmCAAmCmUmUGGA
CUUCGGUCCmAmAmGmUmGGmCmAmCmCmGmAmGmUmCmGmGmUmGmCm
UsmUsmUsmU;
or
(SEQ ID NO: 585)
mAsmUsmCsGACAAGAAAGGGACUGAGUUUUAGAmGmCmCmGmGmCmGm
GmAmAmAmCmGmCmCmGmGmCAAGUUAAAAUAAGGCUAGUCCGUUAmUm
CAAmCmUmUGGACUUCGGUCCmAmAmGmUmGGmCmAmCmCmGmAmGmUm
CmGmGmUmGmCmUmUmUmU;
wherein “N” represents any nucleotide, “mN” indicates a 2′-OMe modification of the nucleotide “N”, fN indicates a 2′-fluoro(F) modification of the nucleotide “N,” and “Ns” indicates that the nucleotide “N” is linked to the following nucleotide by a phosphorothioate.

10. A method of editing an alpha-1 antitrypsin polynucleotide comprising a single nucleotide polymorphism (SNP) associated with alpha-1 antitrypsin deficiency, the method comprising contacting the polynucleotide with one or more guide RNAs, or one or more polynucleotides encoding the one or more guide RNAs, and a base editor, or one or more polynucleotides encoding the base editor, wherein said guide RNA targets said base editor to effect an alteration of the SNP associated with alpha-1 antitrypsin deficiency,
wherein the base editor is the base editor of claim 1.

11. A method of editing an alpha-1 antitrypsin polynucleotide comprising a single nucleotide polymorphism (SNP) associated with alpha-1 antitrypsin deficiency, the method comprising contacting an alpha-1 antitrypsin polynucleotide with one or more guide RNAs and a fusion protein comprising the following amino acid sequence:
(SEQ ID NO: 588)
SEVEFSHEYWMRHALTLAKRARDEREVPVGAVLVHNNRVIGEGWNRAIGL
HDPTAHAEIMALRQGGLVMQNYRLYDATLYTTFEPCVMCAGAMIHSRIGR
VVFGVRNAKTGAAGSLMDVLHYPGMNHRVEITEGILADECAALLCTFFRM
PRSVFKAQKKAQSSTDSGGSSGGSSGSETPGTSESATPESSGGSSGGSDK
KYSIGLAIGTNSVGWAVITDEYKVPSKKFKVLGNTDRHSIKKNLIGALLF
DSGETAEATRLKRTARRRYTRRKNRICYLQEIFSNEMAKVDDSFFHRLEE
SFLVEEDKKHERHPIFGNIVDEVAYHEKYPTIYHLRKKLVDSTDKADLRL
IYLALAHMIKFRGHFLIEGDLNPDNSDVDKLFIQLVQTYNQLFEENPINA
SGVDAKAILSARLSKSRRLENLIAQLPGEKKNGLFGNLIALSLGLTPNFK
SNFDLAEDAKLQLSKDTYDDDLDNLLAQIGDQYADLFLAAKNLSDAILLS
DILRVNTEITKAPLSASMVKRYDEHHQDLTLLKALVRQQLPEKYKEIFFD
QSKNGYAGYIDGGASQEEFYKFIKPILEKMDGTEELLVKLNREDLLRKQR
TFDNGIIPHQIHLGELHAILRRQGDFYPFLKDNREKIEKILTFRIPYYVG
PLARGNSRFAWMTRKSEETITPWNFEEVVDKGASAQSFIERMTNFDKNLP
NEKVLPKHSLLYEYFTVYNELTKVKYVTEGMRKPAFLSGEQKKAIVDLLF
KTNRKVTVKQLKEDYFKKIECFDSVEISGVEDRFNASLGTYHDLLKIIKD
KDFLDNEENEDILEDIVLTLTLFEDREMIEERLKTYAHLFDDKVMKQLKR
LRYTGWGRLSRKLINGIRDKQSGKTILDFLKSDGFANRNFMQLIHDDSLT
FKEDIQKAQVSGQGDSLHEHIANLAGSPAIKKGILQTVKVVDELVKVMGG
HKPENIVIEMARENQTTQKGQKNSRERMKRIEEGIKELGSQILKEHPVEN
TQLQNEKLYLYYLQNGRDMYVDQELDINRLSDYDVDHIVPQSFLKDDSID
NKVLTRSDKNRGKSDNVPSEEVVKKMKNYWRQLLNAKLITQRKFDNLTKA
ERGGLSELDKAGFIKRQLVETRQITKHVAQILDSRMNTKYDENDKLIREV
KVITLKSKLVSDFRKDFQFYKVREINNYHHAHDAYLNAVVGTALIKKYPK
LESEFVYGDYKVYDVRKMIAKSEQEIGKATAKYFFYSNIMNFFKTEITLA
NGEIRKRPLIETNGETGEIVWDKGRDFATVRKVLSMPQVNIVKKTEVQTG
GFSKESILPKGNSDKLIARKKDWDPKKYGGFLQPTVAYSVLVVAKVEKGK
SKKLKSVKELLGITIMERSSFEKNPIDFLEAKGYKEVKKDLIIKLPKYSL
FELENGRKRMLASAKFLQKGNELALPSKYVNFLYLASHYEKLKGSPKDNE
QKQLFVEQHKHYLDEIIEQISEFSKRVILDDANLDKVLSAYNKHRDKPIR
EQAENIIHLFTLTNLGAPRAFKYFDTTIARKEYKSTKEVLDATLIHQSIT
GLYETRIDLSQLGGDEGADKRTADGSEFESPKKKRKV.

12. A polynucleotide or set of polynucleotides encoding the base editor of claim 1.

13. A vector or set of vectors comprising the polynucleotide of claim 15.

14. A cell produced by introducing into the cell, or a progenitor thereof:
the base editor of claim 1, or one or more polynucleotides encoding said base editor;
and
one or more guide polynucleotides, or one or more polynucleotides encoding the one or more guide polynucleotides, wherein the one or more guide polynucleotides target the base editor to effect an A•T to G•C alteration of an SNP associated with alpha-1 antitrypsin deficiency.

15. A method of treating alpha-1 antitrypsin deficiency in a subject, the method comprising administering to said subject a cell claim 17.

16. A method of producing a hepatocyte cell, the method comprising:
(a) introducing into a hepatocyte progenitor comprising an SNP associated with alpha-1 antitrypsin deficiency:
the base editor of claim 1, or one or more polynucleotides encoding said base editor; and
one or more guide polynucleotides, or one or more polynucleotides encoding the one or more guide polynucleotides, wherein said one or more guide polynucleotides target said base editor to effect an A•T to G•C alteration of the SNP associated with alpha-1 antitrypsin deficiency; and
(b) differentiating the hepatocyte progenitor into a hepatocyte.

17. A method for treating alpha-1 antitrypsin deficiency (A1AD) in a subject, the method comprising: administering to the subject the base editor of claim 1, or one or more polynucleotides encoding the base editor; and one or more guide polynucleotides that target the base editor to effect an A•T to G•C alteration of a single nucleotide polymorphism (SNP) associated with A1AD, thereby treating A1AD in the subject.

18. A pharmaceutical composition comprising the base editor system of claim 18.

19. A kit comprising a base editing system of claim 8.

20. A TadA variant comprising an amino acid sequence that is at least 80%, 85%, 90%, 95%, 96%, 97%, 98%, 99%, or 100% identical to a TadA*5 or the following amino acid sequence, or a fragment thereof that does not comprise an N-terminal methionine:
Variant 12
(SEQ ID NO: 589)
MSEVEFSHEYWMRHALTLAKRARDEREVPVGAVLVHNNRVIGEGWNRAIG
LHDPTAHAEIMALRQGGLVMQNYRLYDATLYTTFEPCVMCAGAMIHSRIG
RVVFGVRNAKTGAAGSLMDVLHYPGMNHRVEITEGILADECAALLCTFFR
MPRSVFKAQKKAQSSTD,
further comprising any of the amino acid substitutions or combinations of substitutions listed in any one of Tables 12, 14, or, 17.

21. A Cas9 variant comprising an amino acid sequence that is at least 80%, 85%, 90%, 95%, 96%, 97%, 98%, 99%, or 100% identical to SpCas9 or the following amino acid sequence, or a fragment thereof that does not comprise an N-terminal methionine:
(SEQ ID NO: 590)
MDKKYSIGLAIGTNSVGWAVITDEYKVPSKKFKVLGNTDRHSIKKNLIGA
LLFDSGETAEATRLKRTARRRYTRRKNRICYLQEIFSNEMAKVDDSFFHR
LEESFLVEEDKKHERHPIFGNIVDEVAYHEKYPTIYHLRKKLVDSTDKAD
LRLIYLALAHMIKFRGHFLIEGDLNPDNSDVDKLFIQLVQTYNQLFEENP
INASGVDAKAILSARLSKSRRLENLIAQLPGEKKNGLFGNLIALSLGLTP
NFKSNFDLAEDAKLQLSKDTYDDDLDNLLAQIGDQYADLFLAAKNLSDAI
LLSDILRVNTEITKAPLSASMVKRYDEHHQDLTLLKALVRQQLPEKYKEI
FFDQSKNGYAGYIDGGASQEEFYKFIKPILEKMDGTEELLVKLNREDLLR
KQRTFDNGIIPHQIHLGELHAILRRQGDFYPFLKDNREKIEKILTFRIPY
YVGPLARGNSRFAWMTRKSEETITPWNFEEVVDKGASAQSFIERMTNFDK
NLPNEKVLPKHSLLYEYFTVYNELTKVKYVTEGMRKPAFLSGEQKKAIVD
LLFKTNRKVTVKQLKEDYFKKIECFDSVEISGVEDRFNASLGTYHDLLKI
IKDKDFLDNEENEDILEDIVLTLTLFEDREMIEERLKTYAHLFDDKVMKQ
LKRLRYTGWGRLSRKLINGIRDKQSGKTILDFLKSDGFANRNFMQLIHDD
SLTFKEDIQKAQVSGQGDSLHEHIANLAGSPAIKKGILQTVKVVDELVKV
MGGHKPENIVIEMARENQTTQKGQKNSRERMKRIEEGIKELGSQILKEHP
VENTQLQNEKLYLYYLQNGRDMYVDQELDINRLSDYDVDHIVPQSFLKDD
SIDNKVLTRSDKNRGKSDNVPSEEVVKKMKNYWRQLLNAKLITQRKFDNL
TKAERGGLSELDKAGFIKRQLVETRQITKHVAQILDSRMNTKYDENDKLI
REVKVITLKSKLVSDFRKDFQFYKVREINNYHHAHDAYLNAVVGTALIKK
YPKLESEFVYGDYKVYDVRKMIAKSEQEIGKATAKYFFYSNIMNFFKTEI
TLANGEIRKRPLIETNGETGEIVWDKGRDFATVRKVLSMPQVNIVKKTEV
QTGGFSKESILPKGNSDKLIARKKDWDPKKYGGFMQPTVAYSVLVVAKVE
KGKSKKLKSVKELLGITIMERSSFEKNPIDFLEAKGYKEVKKDLIIKLPK
YSLFELENGRKRMLASAKFLQKGNELALPSKYVNFLYLASHYEKLKGSPE
DNEQKQLFVEQHKHYLDEIIEQISEFSKRVILADANLDKVLSAYNKHRDK
PIREQAENIIHLFTLTNLGAPRAFKYFDTTIARKEYRSTKEVLDATLIHQ
SITGLYETRIDLSQLGGD,
further comprising any of the amino acid substitutions or combinations of substitutions listed in any one of Tables 7, 8, 13, 15, 16, 17, or 18.
